(19) United States
(12) Patent Application Publication
(10) Pub. No.: US 2018/0362590 A1
(43) Pub. Date: Dec. 20, 2018

(54) POLYPEPTIDES WITH TYPE V CRISPR ACTIVITY AND USES THEREOF

(71) Applicant: Synthetic Genomics, Inc., La Jolla, CA (US)

(72) Inventors: Russell David Monds, San Diego, CA (US); Simone Moraes Mantovani, San Diego, CA (US); Russell S. Komor, San Diego, CA (US); Matthew Carey LaFave, Escondido, CA (US); Krishna Kannan, San Diego, CA (US); Joseph W. LaMattina, San Diego, CA (US); Joseph S. Lucas, San Diego, CA (US); Eric R. Moellering, San Diego, CA (US)

(21) Appl. No.: 15/953,286

(22) Filed: Apr. 13, 2018

Related U.S. Application Data
(60) Provisional application No. 62/657,489, filed on Apr. 13, 2018.
(60) Provisional application No. 62/586,852, filed on Nov. 15, 2017.
(60) Provisional application No. 62/485,796, filed on Apr. 14, 2017.

(51) Int. Cl. C07K 14/00; C12N 15/113; C12P 19/34; C12N 15/11; C12N 15/62; C12N 9/22

(52) U.S. Cl. CPC C07K 14/00; C12N 15/113; C12P 19/34; C12N 15/111; C07K 2319/10; C12N 9/22; C12N 2310/20; C07K 2319/03; C12N 15/62

(57) ABSTRACT

Disclosed herein are novel polypeptides having nuclease activity. The Mmc3 polypeptides function as Class 2 Type V effectors, and catalyze double stranded breaks in nucleic acid strands. The polypeptides are useful, for example, for gene editing systems such as CRISPR, to make site specific alterations of target nucleic acid sequences.

### CROSS-REFERENCE TO RELATED APPLICATIONS

[0001] This application claims benefit of priority under 35 U.S.C. § 119(e) of U.S. Ser. No. 62/485,796, filed Apr. 14, 2017, to U.S. Ser. No. 62/586,852, filed Nov. 15, 2017, and to U.S. Ser. No. 62/657,489, filed Apr. 13, 2018, the entire contents of which are incorporated herein by reference in their entireties.

### INCORPORATION BY REFERENCE OF SEQUENCE LISTING

[0002] The material in the accompanying sequence listing is hereby incorporated by reference into the application. The accompanying sequence listing text file, name SGI2090_2_Sequence_Listing, was created on Apr. 12, 2018, and in 642 kb. The file can be accessed using Microsoft Word on a computer that uses Window OS.

### FIELD OF THE INVENTION

[0003] The present invention relates generally to polypeptides which effect breaks at defined locations within DNA and more specifically the use of such polypeptides for gene editing.

### BACKGROUND OF THE INVENTION

[0004] Certain prokaryotes (some bacteria and most archaea) display primitive adaptive immunity against bacteriophage infections, and can eliminate the invading genetic material. The CRISPR/Cas system is an example of such a prokaryotic immune system. Clustered regularly interspaced short palindromic repeats (CRISPR) are segments of prokaryotic DNA containing short, repetitive base sequences (for example, up to 100 identical repeats of 25-40 base pairs). Each CRISPR repeat sequence is followed by short segments of interspersed exogenous “spacer” DNA from previous “infections”, i.e., exposure to viruses, phage, or plasmids. CRISPR clusters are transcribed as multi-unit precursors that are subsequently cleaved into smaller units, and processed to form guide CRISPR RNAs (guide RNA) that consist of one spacer flanked by sequence derived from a CRISPR repeat. CRISPR loci also contain one or more genes encoding Cas proteins. The guide RNA harboring the spacer sequence directs Cas proteins to exogenous invading DNA and allows the enzyme to cleave it, thereby conferring a type of resistance against the invader. DNA is recognized for cleavage not only by its homology to a spacer sequence of the CRISPR cluster, but also by its proximity to a protospacer adjacent motif (PAM), a sequence that is typically 2-6 nucleotides in length.

[0005] The CRISPR/Cas system has been adapted to manipulate DNA in situ, permitting gene editing within cells. The CRISPR/Cas9 system is an example of the original application, and provides a system that delivers a Cas9 nuclease complexed with a synthetic guide RNA (gRNA) into a target cell. The cell's genome is cut at a specified location. This permits further modification of the target cell genome. However, the CRISPR system is limited by the PAM sequence requirements of the Cas9 and Cpf1 nucleases (reviewed in Hu et al. (2014) Cell, 157: 1262-1278 and Zetsche et al. (2015) Cell 163: 759-771). CRISPR systems have also demonstrated differential ability to target different sites in the genome. Part of this is due to PAM restrictions, however, some of these differences are seemingly due to less defined characteristics of the different systems. There remains a need in the art for unique nucleases that can be used in engineered CRISPR systems that can be used to edit nucleic acids in a variety of contexts, that can expand the potential of these systems for directed gene editing.

### SUMMARY OF THE INVENTION

[0006] Described herein are gene editing (CRISPR) systems, that are useful for modifying target nucleic acid sequences. Accordingly, provided herein is an engineered or non-naturally-occurring CRISPR-Cas system that includes an engineered guide RNA comprising a guide sequence, where the guide sequence is capable of hybridizing with a target sequence of a target nucleic acid molecule, and an Mmc3 effector or a nucleic acid molecule encoding an Mmc3 effector, where the engineered guide RNA and the Mmc3 effector protein do not naturally occur together. The guide RNA can comprise at least a portion of a CRISPR repeat of an Mmc3 Type V CRISPR Cas system. The target sequence, the guide RNA, and the effector form a complex which causes cleavage of the target molecule distal to a protospacer adjacent motif (PAM), where the target sequence of the target molecule can be 3′ of the PAM.

[0007] Also provided herein is an engineered or non-naturally-occurring CRISPR-Cas system having a polynucleotide sequence that encodes an engineered guide RNA and an Mmc3 effector or a nucleic acid molecule encoding an Mmc3 effector, where the engineered guide RNA and the Mmc3 effector protein do not naturally occur together. The polynucleotide sequence that encodes an engineered guide RNA and the polynucleotide sequence that encodes an Mmc3 effector can be operably linked to regulatory elements. A regulatory element operably linked to a nucleic acid sequence encoding an Mmc3 effector and/or a regulatory element operably linked to a nucleic acid sequence encoding a guide RNA can be a promoter, such as a promoter that is active in a host cell of interest. A regulatory element operably linked to either or both of an effector gene or a guide RNA gene can be inducible. The expression cassettes for the guide RNA and the Mmc3 effector can be on the same or different nucleic acid molecules. The guide sequence of the guide RNA is capable of hybridizing with a target sequence of a target nucleic acid molecule and can hybridize with a target sequence 3′ of a protospacer adjacent motif (PAM). The target sequence, the guide RNA, and the effector form a complex which causes cleavage of the target molecule distal to the PAM.

[0008] In various embodiments of engineered or non-naturally occurring CRISPR-Cas systems provided herein the Mmc3 effector polypeptide can comprise:

[0009] an amino acid sequence selected from the group consisting of SEQ ID NO:1, SEQ ID NO:2, SEQ ID NO:3, SEQ ID NO:4, SEQ ID NO:5, SEQ ID NO:6, SEQ ID NO:7, SEQ ID NO:8, SEQ ID NO:9, SEQ ID NO:12, SEQ ID NO:16, SEQ ID NO:17, SEQ ID NO:18, SEQ ID NO:19, SEQ ID NO:20, SEQ ID NO:21, SEQ ID NO:22, SEQ ID NO:23, SEQ ID NO:24, SEQ ID NO:25, and SEQ ID NO:26; or

[0010] a variant of an Mmc3 effector comprising an amino acid sequence having at least 60%, 65%, 70%, 75%, 80%, 85%, 90%, or 95% identity to an amino acid sequence selected from the group consisting of SEQ ID NO:1, SEQ ID NO:2, SEQ ID NO:3, SEQ ID NO:4, SEQ ID NO:5, SEQ ID NO:6, SEQ ID NO:7, SEQ ID NO:8, SEQ ID NO:9, SEQ ID NO:12, SEQ ID NO:16, SEQ ID NO:17, SEQ ID NO:18, SEQ ID NO:19, SEQ ID NO:20, SEQ ID NO:21, SEQ ID NO:22, SEQ ID NO:23, SEQ ID NO:24, SEQ ID NO:25, and SEQ ID NO:26; or

[0011] a naturally-occurring Mmc3 effector comprising an amino acid sequence having at least 50%, 55%, 60%, 65%, 70%, 75%, 80%, 85%, 90%, or 95% identity to an amino acid sequence selected from the group consisting of SEQ ID NO:1, SEQ ID NO:2, SEQ ID NO:3, SEQ ID NO:4, SEQ ID NO:5, SEQ ID NO:6, SEQ ID NO:7, SEQ ID NO:8, SEQ ID NO:9, SEQ ID NO:16, SEQ ID NO:17, SEQ ID NO:18, SEQ ID NO:19, SEQ ID NO:20, SEQ ID NO:21, SEQ ID NO:22, SEQ ID NO:23, SEQ ID NO:24, SEQ ID NO:25, and SEQ ID NO:26.

[0012] An engineered or non-naturally occurring CRISPR system that includes an Mmc3 effector polypeptide or a gene encoding an Mmc3 effector polypeptide as provided herein can be used to modify a target nucleic acid molecule in vitro or in vivo and can be used for in vivo editing of nucleic acid molecules in prokaryotic or eukaryotic cells. The target nucleic acid molecule can be a DNA molecule, and can be an episomal DNA molecule within a cell of interest, or can be genomic (e.g., chromosomal) DNA. The target DNA can also be an isolated nucleic acid molecule, for example, where the system is used for in vitro target modification.

[0013] Mmc3 effector polypeptides comprise a family of Class 2, Type V traguide RNA-independent RNA-guided nucleases, or effector polypeptides, as disclosed in detail herein. The Mmc3 family forms a distinct group of RNA-guided endonucleases that include an RuvC domain characterized by three catalytic motifs with characteristic spacing. The Mmc3 effectors lack a nuc domain and include a zinc finger domain characterized by two cysteine pairs that occur between the second and third RuvC motifs. An Mmc3 effector used in the systems and methods provided herein can be any Mmc3 effector, including any disclosed herein, orthologs thereof, and variants thereof. In various embodiments, the effector is derived from a bacterial species, such as but not limited to a species of the order Bacteriodales, or any of the genera Bacteroides, Porphyromonas, Sulfuricurvum, Smithella, Candidatus, or Omnitrophica. In some embodiments the effector includes a nuclear localization signal and/or the gene encoding the effector is codon optimized for expression or function in a host cell of interest, which can be, for example, a eukaryotic cell. An Mmc3 effector as provided herein can include, for example, a nuclear localization sequence (NLS) and/or a purification tag or detection tag or can include a labeling moiety directly or indirectly conjugated or bound to the protein.

[0014] The guide RNA, or crRNA, in various embodiments does not include tracr sequences and can include at least a portion of one or more repeat sequences of a naturally-occurring Mmc3 CRISPR system. The CRISPR repeat sequences of the guide RNA can be 5′ of the guide sequence, and can be positioned both 5′ and 3′ of the guide (target) sequence. A guide RNA can be produced within the target cell, for example, by transcription within the cell of a CRISPR array (CRarray) or portion thereof or of a construct that includes a guide sequence (sometimes referred to as the spacer sequence or target sequence) juxtaposed with one or more sequences derived from a CRISPR repeat, or can be synthesized in vitro, for example, by in vitro transcription of a DNA construct or by chemical synthesis. A guide RNA used in the systems disclosed herein can optionally include modifications, such as but not limited to phosphorothioates or 2′-OMe groups. A guide RNA can optionally include one or more deoxynucleotides.

[0015] The guide RNA forms a complex with an Mmc3 effector protein and causes cleavage of one or more target nucleic acid molecules having a sequence homologous to the guide sequence (also called the targeting sequence or spacer sequence) of the guide RNA. In various examples, the percentage of nucleic acid molecule cleavage performed by an Mmc3 system as provided herein can be from about 4% to 100%. Systems and methods provided herein can include two or more guide RNAs or nucleotide sequences encoding guide RNAs that have different guide sequences. The guide RNAs in some examples can target the different sites on the same target nucleic acid molecule which can optionally be different sites within the same gene. Alternatively, the two or more guide RNAs can target different genes or different target nucleic acid molecules.

[0016] In some embodiments of the nucleic acid editing systems provided herein, a guide RNA complexed with an Mmc3 effector protein is provided. The complexed guide RNA and Mmc3 effector can be used for in vitro DNA modification, or can be delivered to a cell, for example, by electroportation, peptide-mediated protein delivery, liposome delivery, biolistics, or other methods, for in vivo modification of or binding to target DNA.

[0017] In some embodiments of the nucleic acid editing systems provided herein, the CRISPR-Cas system further includes an Mmc3 ORF3 polypeptide or a polynucleotide sequence encoding an Mmc3 ORF3 polypeptide. The ORF3 polypeptide can be any ORF3 polypeptide of an Mmc3 system or a variant thereof having at least 60%, at least 65%, at least 70%, at least 75%, at least 80%, at least 85%, at least 90%, at least 95%, at least 98%, or at least 99% to a naturally-occurring Mmc3 ORF3 polypeptide. Exemplary Mmc3 ORF3 polypeptide include those comprising amino acid sequence of SEQ ID NO:50-58. In some embodiments a CRISPR-Cas system includes a polynucleotide sequence encoding a guide RNA, a nucleic acid molecule encoding an effector polypeptide, such as an Mmc3 or Cpf1 effector polypeptide, and a polynucleotide sequence encoding an ORF3 polypeptide. The guide RNA construct and the nucleic acid molecules encoding the effector and ORF3 polypeptides can be operably linked to regulatory elements. One of more of the regulatory elements can be an inducible promoter.

[0018] Further included herein is a method of modifying one or more target nucleic acid molecules in vivo, where the method comprises delivering to a cell that includes at least one target molecule comprising at least one target sequence a) one or more guide RNAs, or one or more nucleotide sequences encoding one or more guide RNAs, and b) an Mmc3 effector polypeptide, or a gene encoding an Mmc3 effector polypeptide, where the guide RNA is engineered to target a nucleic acid molecule in the cell. In various examples, the guide RNA and Mmc3 effector do not naturally occur together and/or do not naturally occur in the cell to which they are delivered. The guide RNA has homology to a sequence in the target nucleic acid molecule, and the target nucleic acid molecule can be modified by the Mmc3 effector complexed with the guide RNA. The rate of target nucleic acid modification can be at least 4%, at least 5%, at least 10%, at least 15%, at least 20%, at least 25%, at least 30%, at least 35%, at least 40%, at least 45%, at least 50%, at least 55%, at least 60%, at least 65%, at least 70%, at least 75%, at least 80%, at least 85%, at least 90%, at least 95%, at least 98%, or at least 99%. The target nucleic acid molecule can be a DNA molecule. The modification can be cleavage, or can be mutation, for example, by nucleotide changes, delection of nucleotides, or insertion of one or more nucleotide that may occur during repair processes following cleavage by the Mmc3 effector. In some embodiments, the method can further include delivering a donor or repair template sequence to the cell. The donor or repair sequence can optionally include sequences that mediate homologous recombination into the targeted locus, e.g., sequences having a homology to sequences at or proximal to the target site (protospacer) of the nucleic acid molecule. In some embodiments, the donor or repair fragment can include a selectable marker.

[0019] The methods of modifying one or more target nucleic acid molecules in vivo can further include delivering to the target cell an Mmc3 ORF3 polypeptide or a polynucleotide sequence encoding an Mmc3 ORF3 polypeptide. Also included are methods of modifying one or more target nucleic acid molecules in vivo, where the method comprises delivering to a cell that includes at least one target molecule comprising at least one target sequence a) one or more guide RNAs, or one or more nucleotide sequences encoding one or more guide RNAs, b) an Mmc3 effector polypeptide, or a gene encoding an Mmc3 effector polypeptide, and c) an Mmc3 ORF3 polypeptide, where the guide RNA is engineered to target a nucleic acid molecule in the cell. In various examples, the guide RNA and Mmc3 effector do not naturally occur together and/or do not naturally occur in the cell to which they are delivered. The guide RNA has homology to a sequence in the target nucleic acid molecule, and the target nucleic acid molecule can be modified by the Mmc3 effector complexed with the guide RNA. The rate of target nucleic acid modification can be greater than the rate of target nucleic acid modification performed by the same CRISPR-cas system that lacks an Mmc3 ORF3 polypeptide. The effector polypeptide can by an Mmc3 or Cpf1 effector polypeptide. The target nucleic acid molecule can be a DNA molecule. The modification can be cleavage, or can be mutation, for example, by nucleotide changes, delection of nucleotides, or insertion of one or more nucleotide that may occur during repair processes following cleavage by the effector. In some embodiments, the method can further include delivering a donor or repair template sequence to the cell. The donor or repair sequence can optionally include sequences that mediate homologous recombination into the targeted locus, e.g., sequences having a homology to sequences at or proximal to the target site (protospacer) of the nucleic acid molecule. In some embodiments, the donor or repair fragment can include a selectable marker.

[0020] The methods provided herein can use any Mmc3 effector polypeptide, including but not limited to any disclosed herein, e.g., any of the Mmc3 effectors listed in Table 2 or Table 3, or variants thereof having at least 60%, 65%, 70%, 75%, 80%, 85%, 90%, or 95% identity thereto.

[0021] The host cell can be a prokaryotic cell or a eukaryotic cell. For example, the method can be a method of modifying one or more target nucleic acid molecules in a eukaryotic cell, such as an animal or plant cell, or a fungal, algal, or labyrinthulomycete cell. The nucleotide sequence encoding the Mmc3 effector protein can be codon optimized for expression in a target cell, such as a eukaryotic cell, and/or can include one or more nuclear localization signal(s) (NLS(s)). In some embodiments of the methods, a sequence encoding a guide RNA and a sequence encoding an Mmc3 effector protein are provided on the same vector. The guide RNA-encoding sequence and Mmc3-encoding squence can be operably linked to regulatory elements, such as promoters. In other embodiments, the guide RNA and Mmc3 effector polypeptide are provided to the cell as a complex. In further embodiments, a host cell of interest that is transformed with a gene encoding an Mmc3 effector protein is subsequently transformed with a guide RNA targeting a host target nucleic acid molecule. In some examples, a host cell of interest expresses a transgene encoding an Mmc3 effector protein prior to being transformed with a guide RNA targeting the host target nucleic acid molecule. The guide RNA introduced into the host cell can optionally be chemically modified, such as with phosphorothioate or one or more 2′-OMe groups and/or can include one or more deoxynucleotides.

[0022] In some embodiments, the method is a method of modifying one or more target nucleic acid molecules in a eukaryotic cell, where the method comprises delivering to a eukaryotic cell that includes at least one target molecule comprising at least one target sequence a) one or more guide RNAs, or one or more nucleotide sequences encoding one or more guide RNAs, and b) an Mmc3 effector polypeptide, or a gene encoding an Mmc3 effector polypeptide, where the guide RNA is engineered to target a nucleic acid molecule in the cell, where the target nucleic acid molecule sequence is modified by the Mmc3 effector and the target DNA sequence modification rate is at least 5%, at least 10%, at least 15%, at least 20%, at least 25%, at least 30%, at least 35%, at least 40%, at least 45%, at least 50%, at least 55%, at least 60%, at least 65%, at least 70%, at least 75%, at least 80%, at least 85%, at least 90%, at least 95%, at least 98%, or at least 99%. The Mmc3 effector can comprise, for example:

[0023] an amino acid sequence selected from the group consisting of SEQ ID NOs:1-26; or

[0024] a variant of an Mmc3 effector comprising an amino acid sequence having at least 60%, 65%, 70%, 75%, 80%, 85%, 90%, or 95% identity to any of SEQ ID NOs:1-25; or

[0025] a naturally-occurring Mmc3 effector having at least 50% identity to any of SEQ ID NOs:1-25.

[0026] For example, the method of modifying a nucleic acid molecule in a eukaryotic cell, such as a fungal, algal, plant, or animal cell, can include delivering to a eukaryotic cell that includes at least one target molecule comprising at least one target sequence a) one or more guide RNAs, or one or more nucleotide sequences encoding one or more guide RNAs, and b) an Mmc3 effector polypeptide, or a gene encoding an Mmc3 effector polypeptide, where the Mmc3 effector polypeptide comprises an amino acid sequence having at least 50%, 55%, 60%, 65%, 70%, 75%, 80%, 85%, 90%, or 95% identity to SEQ ID NO:1, SEQ ID NO:2, SEQ ID NO:3, SEQ ID NO:4, SEQ ID NO:5, SEQ ID NO:6, SEQ ID NO:7, SEQ ID NO:8, SEQ ID NO:9, SEQ ID NO:12, SEQ ID NO:16, SEQ ID NO:17, SEQ ID NO:18, SEQ ID NO:19, SEQ ID NO:20, SEQ ID NO:21, SEQ ID NO:22, SEQ ID NO:23, SEQ ID NO:24, SEQ ID NO:25, or SEQ ID NO:26. The guide RNA is engineered to target a nucleic acid molecule in the cell, and the target nucleic acid molecule sequence is modified by the Mmc3 effector where the target DNA sequence modification rate is at least 5%, for example, at least 10%, at least 15%, at least 20%, at least 25%, at least 30%, at least 35%, at least 40%, at least 45%, at least 50%, at least 55%, at least 60%, at least 65%, at least 70%, at least 75%, at least 80%, at least 85%, at least 90%, at least 95%, at least 98%, or at least 99%. In some embodiments the Mmc3 effector polypeptide has at least 50%, 55%, 60%, 65%, 70%, 75%, 80%, 85%, 90%, or 95% identity to SEQ ID NO:1, SEQ ID NO:2, SEQ ID NO:3, SEQ ID NO:4, SEQ ID NO:5, SEQ ID NO:6, SEQ ID NO:7, SEQ ID NO:16, SEQ ID NO:17, SEQ ID NO:20, or SEQ ID NO:21. In some embodiments the Mmc3 effector polypeptide has at least 50%, 55%, 60%, 65%, 70%, 75%, 80%, 85%, 90%, or 95% identity to SEQ ID NO:1, SEQ ID NO:2, SEQ ID NO:3, SEQ ID NO:5, SEQ ID NO:6, or SEQ ID NO:7.

[0027] Also provided herein is a cell or organism engineered to express an Mmc3 effector polypeptide, where the Mmc3 effector polypeptide is not native to the engineered cell or organism. In various embodiments the Mmc3 effector polypeptide can comprise:

[0028] an amino acid sequence selected from the group consisting of SEQ ID NO:1, SEQ ID NO:2, SEQ ID NO:3, SEQ ID NO:4, SEQ ID NO:5, SEQ ID NO:6, SEQ ID NO:7, SEQ ID NO:8, SEQ ID NO:9, SEQ ID NO:12, SEQ ID NO:16, SEQ ID NO:17, SEQ ID NO:18, SEQ ID NO:19, SEQ ID NO:20, SEQ ID NO:21, SEQ ID NO:22, SEQ ID NO:23, SEQ ID NO:24, SEQ ID NO:25, and SEQ ID NO:26; or

[0029] a variant of an Mmc3 effector comprising an amino acid sequence having at least 60%, 65%, 70%, 75%, 80%, 85%, 90%, or 95% identity to SEQ ID NO:1, SEQ ID NO:2, SEQ ID NO:3, SEQ ID NO:4, SEQ ID NO:5, SEQ ID NO:6, SEQ ID NO:7, SEQ ID NO:8, SEQ ID NO:9, SEQ ID NO:12, SEQ ID NO:16, SEQ ID NO:17, SEQ ID NO:18, SEQ ID NO:19, SEQ ID NO:20, SEQ ID NO:21, SEQ ID NO:22, SEQ ID NO:23, SEQ ID NO:24, SEQ ID NO:25, or SEQ ID NO:26; or

[0030] a naturally-occurring Mmc3 effector having at least 50% identity to SEQ ID NO:1, SEQ ID NO:2, SEQ ID NO:3, SEQ ID NO:4, SEQ ID NO:5, SEQ ID NO:6, SEQ ID NO:7, SEQ ID NO:8, SEQ ID NO:9, SEQ ID NO:12, SEQ ID NO:16, SEQ ID NO:17, SEQ ID NO:18, SEQ ID NO:19, SEQ ID NO:20, SEQ ID NO:21, SEQ ID NO:22, SEQ ID NO:23, SEQ ID NO:24, SEQ ID NO:25, or SEQ ID NO:26.

The cell or organism can be a prokaryotic or eukaryotic cell or organism that does not naturally include a gene encoding an Mmc3 effector, and can be, for example, a fungal, labyrinthulomycete, algal, plant, animal, avian, reptile, amphibian, fish, cephalopod, crustacean, insect, arachnid, marsupial, or mammalian cell or organism. The gene encoding an Mmc3 effector that in non-native with respect to the host organism can be operably linked to a regulatory element, such as a promoter. The promoter can be native to the host organism or can be a promoter of another species. A construct for expressing an Mmc3 effector in a heterologous host, such as a eukaryotic organism, can optionally further include a terminator. The gene encoding the Mmc3 effector can optionally be codon optimized for the host species, can optionally include one or more introns, and can optionally include one or more peptide tag sequences, one or more nuclear localiztion sequences (NLSs) and/or one or more linkers or engineered cleavage sites (e.g., a 2a sequence). In various embodiments a cell or organism can include any of the engineered Mmc3 CRISPR systems disclosed above, where the nucleic acid sequence encoding the effector is present in the cell prior to introduction of a guide RNA. In other embodiments, the cell that in engineered to include a gene for expressing an Mmc3 effector polypeptide can further include a polynucleotide encoding a guide RNA (e.g., a guide RNA) that is operably linked to a regulatory element. In some embodiments the Mmc3 effector polypeptide has at least 50%, 55%, 60%, 65%, 70%, 75%, 80%, 85%, 90%, or 95% identity to SEQ ID NO:1, SEQ ID NO:2, SEQ ID NO:3, SEQ ID NO:4, SEQ ID NO:5, SEQ ID NO:6, SEQ ID NO:7, SEQ ID NO:16, SEQ ID NO:17, SEQ ID NO:20, or SEQ ID NO:21. In some embodiments the Mmc3 effector polypeptide has at least 50%, 55%, 60%, 65%, 70%, 75%, 80%, 85%, 90%, or 95% identity to SEQ ID NO:1, SEQ ID NO:2, SEQ ID NO:3, SEQ ID NO:5, SEQ ID NO:6, or SEQ ID NO:7.

[0031] Also provided herein are Mmc3 effector polypeptides and genes encoding such Mmc3 effector polypeptides. In one aspect, Mmc3 effector polypeptides comprising amino acid sequences selected from the group consisting of SEQ ID NOs: 1, 2, 3, 4, 5, 6, 7, 8, 9, 17, 18, 19, 20, 21, 22, 23, 24, 25, and 26 or variants having at least least 50%, at least 55%, at least 60%, at least 65%, at least 70%, at least 75%, at least 80%, at least 85%, at least 90%, at least 95%, at least 98%, or at least 99% thereto, are provided, where the effector polypeptides are outside of the prokaryotic species they are native to. For example, the Mmc3 effector polypeptides may be partially or substantially purified away from other cellular components and may be, as nonlimiting examples, outside the context of a cell, in solution (liquid or frozen) or in particulate (solid) form (for example, in a precipitate, in a crystalline form, and/or as a lyophilate), or may be in a cell that the Mmc3 effector is not naturally found in, which may be a prokalryotic or eukaryotic cell. The polypeptides can include one or more non-Mmc3 amino acid sequences, such as but not limited to, an NLS or a purification or detection tag. In some embodiments, the polypeptides can have at least one mutation the results in reduced nuclease activity, as disclosed herein. The polypeptides can by part of fusion proteins, such as, for example, with a fluorescent protein, a DNA modifying enzyme, or a transcriptional activation domain

[0032] Also provided are nucleic acid molecules encoding Mmc3 effector polypeptides comprising amino acid sequences selected from the group consisting of SEQ ID NOs: 1, 2, 3, 4, 5, 6, 7, 8, 9, 17, 18, 19, 20, 21, 22, 23, 24, 25, and 26, or variants having at least 50%, at least 55%, at least 60%, at least 65%, at least 70%, at least 75%, at least 80%, at least 85%, at least 90%, at least 95%, at least 98%, or at least 99% identity thereto. The Mmc3 genes can be codon-optimized for a species in which expression of the Mmc3 effector is desired, and can optionally include one or more introns that can optionally be derived from the species in which the Mmc3 gene is to be expressed. An Mmc3 gene as provided herein can encode an Mmc3 polypeptide that includes an NLS and/or a purification or detection tag. An Mmc3 gene as provided herein can encode a fusion protein that includes the Mmc3 polypeptide translationally linked to another polypeptide such as, for example, a fluorescent protein. A nucleic acid molecule that includes a nucleic acid sequence encoding an Mmc3 effector polypeptide can be an expression cassette that includes a promoter operably linked to the nucleic acid sequence encoding the Mmc3 effector polypeptide. A nucleic acid molecule encoding an Mmc3 effector polypeptide can be a vector that includes one or both of an origin of replication and a selectable marker.

[0033] Further provided is a nuclease-deficient mutant of an Mmc3 effector polypeptide, such as any disclosed herein, including an Mmc3 polypeptide having at least at least 50%, at least 55%, at least 60%, at least 65%, at least 70%, at least 75%, at least 80%, at least 85%, at least 90%, at least 95%, at least 98%, or at least 99% identity to any of SEQ ID NO:1, SEQ ID NO:2, SEQ ID NO:3, SEQ ID NO:4, SEQ ID NO:5, SEQ ID NO:6, SEQ ID NO:7, SEQ ID NO:8, SEQ ID NO:9, SEQ ID NO:12, SEQ ID NO:16, SEQ ID NO:17, SEQ ID NO:18, SEQ ID NO:19, SEQ ID NO:20, SEQ ID NO:21, SEQ ID NO:22, SEQ ID NO:23, SEQ ID NO:24, SEQ ID NO:25, or SEQ ID NO:26. The nuclease-deficient mutant polypeptide can be mutated in at least one amino acid of the RuvCI motif or at least one amino acid of the RuvCII motif, for example, may have a mutation of the amino acid corresponding to D841 or E1061 of BdMmc3 (SEQ ID NO:1). In some embodiments the mutation is a mutation of aspartate or glutamate to alanine.

[0034] In another aspect provided herein is a CRISPR system that comprises: at least one effector polypeptide or a nucleic acid construct for expressing an effector polypeptide, at least one guide RNA or a nucleic acid construct for expressing a guide RNA, and at least one Mmc3 ORF3 polypeptide or a nucleic acid construct for expressing an Mmc3 ORF3 polypeptide. The CRISPR system effector polypeptide can be, for example, an Mmc3 effector or a variant thereof, such as any disclosed herein, or a Cpf1 effector or a variant thereof, including Cpf1 effectors known in the art and disclosed herein. An ORF3 polypeptide can be any Mmc3 ORF3 polypeptide (e.g., any of SEQ ID NOs:50-58, or a variant having at least 50%, at least 55%, at least 60%, at least 65%, at least 70%, at least 75%, at least 80%, at least 85%, at least 90%, at least 95%, at least 98%, or at least 99% identity thereto. Provided herein is a CRISPR system comprising a Cpf1 effector having at least 95% identity to SEQ ID NO:200 (Smp2Cpf1). The CRISPR system includes a Cpf1 effector having at least 95% identity to SEQ ID NO:200 or a polynucleotide sequence encoding a Cpf1 effector having at least 95% identity to SEQ ID NO:200 and a guide RNA, where the Cpf1 effector and guide RNA do not naturally occur together, and optionally further includes an Mmc3 ORF3 polypeptide, or a polynucleotide sequence encoding an Mmc3 ORF3 polypeptide.

[0035] A CRISPR system as disclosed herein can include an Mmc3 ORF3 polypeptide that can, for example, introduced into cells by electroporation, biolistics, peptide protein transporters, liposomes, or other protein delivery vehicles. An Mmc3 ORF3 polypeptide can be delivered to a target cell along with an effector polypeptide, or, for example, an ORF3 polypeptide can be introduced into a target cell that includes an expression construct for producing an effector polypeptide, and optionally, a guide RNA. Alternatively, an Mmc3 ORF3 polypeptide can be delivered to a target cell along with a guide RNA, or can be delivered to a cell that includes a guide RNA expression construct or will independently be transfected with a guide RNA. A CRISPR system can alternatively include a polynucleotide sequence encoding an Mmc3 ORF3 polypeptide. A gene encoding an Mmc3 ORF3 polypeptide can be codon-optimized for expression in the target cell, and can optionally include a sequence encoding an NLS and/or a peptide tag.

[0036] Further provided is a cell engineered to express an Mmc3 ORF3 polypeptide. As disclosed herein, a host cell engineered to express an ORF3 cell is a cell that does not naturally include an ORF3 gene, and may be, for example, a eukaryotic cell. The ORF3 gene can be codon-optimized and can encode one or more NLSs in the ORF3 coding sequence, for example at the N or C terminus of the ORF3 polypeptide.

[0037] Further provided is a method for genome modification, comprising delivering to a cell that includes at least one target molecule comprising at least one target sequence a) one or more guide RNAs, or one or more nucleotide sequences encoding one or more guide RNAs, b) an effector polypeptide, or a gene encoding an effector polypeptide; and an Mmc3 ORF3 polypeptide, or a gene encoding an Mmc3 ORF3 polypeptide, where the guide RNA is engineered to target a nucleic acid molecule in the cell, and the guide RNA, effector polypeptide, and ORF3 polypeptide do not naturally occur together, where the target nucleic acid molecule is modified by the effector polypeptide. The effector polypeptide can be, for example, a Cpf1 effector or Mmc3 effector. The modification can be cleavage, or can be mutation, for example, by nucleotide changes, delection of nucleotides, or insertion of one or more nucleotide that may occur during repair processes following cleavage by the Mmc3 effector. In some embodiments, the method can further include delivering a donor or repair template sequence to the cell. The donor or repair sequence can optionally include sequences that mediate homologous recombination into the targeted locus, e.g., sequences having a homology to sequences at or proximal to the target site (protospacer) of the nucleic acid molecule. In some embodiments, the donor or repair fragment can include a selectable marker. In various embodiments, an Mmc3 ORF3 polypeptide can increase the efficiency of nucleic acid modification by an effector polypeptide.

[0038] The features of the invention are now described in illustrative embodiments in which certain principles of the invention are set forth. These particular embodiments are exemplary, and not intended to limit the scope of the invention.

### BRIEF DESCRIPTION OF THE DRAWINGS

[0039] FIG. 1 illustrates eight exemplary architectures of gene editing systems, showing arrangement of the related genes with respect to each other. A minimal system includes an effector polypeptide (Mmc3) and a CR (CRISPR) array. Only NoMmc3 and SfMmc3 systems show conservation of known cas1, cas2 and cas4 genes. ORF3 encodes a predicted protein of unknown function that is conserved across several Mmc3 systems.

[0040] FIG. 2A-2C shows an alignment of ORF3 protein sequences from Mmc3 systems. 1. No2Mmc3 ORF3, SEQ ID NO:55. 2. NoMmc3 ORF3, SEQ ID NO:53. 3. No3Mmc3 ORF3, SEQ ID NO:58. 4. Sfm ORF3, SEQ ID NO:50. 5. Sv2 ORF3, SEQ ID NO:56. 6. Sv3 ORF3, SEQ ID NO:57. 7. Sv ORF3, SEQ ID NO:51.

[0041] FIGS. 3A-3B, FIG. 3A shows an alignment of Mmc3 CRISPR repeat sequences, based on predictions from CRISPRfinder and CRISPRdetect software. The 3′ approsimately half of the sequence is highly conserved amongst Mmc3 systems. CRISPR repeat sequences shown are, top to bottom, Consensus: SEQ ID NO:27; SvMmc3: SEQ ID NO:30; SmpMmc3: SEQ ID NO:39; Smp2Mmc3: SEQ ID NO:40; ShMmc3: SEQ ID NO:32; SfpMmc3: SEQ ID NO:36; SfMmc3: SEQ ID NO:29; ObpMmc3: SEQ ID NO:42; NoMmc3: SEQ ID NO:33; NapMmc3: SEQ ID NO:31; CrpMmc3: SEQ ID NO:41; BdMmc3: SEQ ID NO:28. FIG. 3B depicts RNA secondary structure predictions for the conserved 3′ region of two Mmc3 family members SvMmc3 (SEQ ID NO:137) and BdMmc3 (SEQ ID NO:47).

[0042] FIG. 4 depicts the location of the RuvC I (light grey bars), RuvC II (dark grey bars), and RuvC III (black bars) catalytic sites (black bars) of the Ruv C domain in various CRISPR class 2 effector polypeptides. Mmc3 polypeptides have a unique RuvC sub-domain distribution in relation to other class 2 polypeptides, Cpf1, C2c1, C2c3, CasX, CasY (all Type V) and Cas9 (Type II). Scaling for each sub-type was derived using average lengths taken from the representative sequences shown in FIG. 5.

[0043] FIG. 5 shows an amino acid sequence alignment of RuvC catalytic motifs in Mmc3 effectors, with have unique spacing and sequence relative to other class 2 CRISPR systems. The numbers of residues between sequence blocks are listed along with the total number of residues in each protein. Conserved residues with amino acids with small side chains (G, S, T, C, A, V) are highlighted in white, with hydrophobic side chains (A, V, I, L, M, F, Y, W) are highlighted in light grey, with polar side chains (N, Q, H) are highlighted in grey, with negatively charged side chains (D, E) are highlighted in darker grey, and with positively charged side chains (R, K) are highlighted in darkest grey. Sequences shown are, top to bottom, BdMmc3: SEQ ID NO:1; SfpMmc3: SEQ ID NO:15; PcMmc3: SEQ ID NO:7; SfMmc3: SEQ ID NO:2; SvMmc3: SEQ ID NO:3; Sv2Mmc3: SEQ ID NO:17; ObpMmc3: SEQ ID NO:14; Smp2Mmc3: SEQ ID NO:12; NapMmc3: SEQ ID NO:4; SfpMmc3: SEQ ID NO:15; NoMmc3: SEQ ID NO:6; No2Mmc3: SEQ ID NO:16; ShMmc3: SEQ ID NO:5; SmpMmc3: SEQ ID NO:11; Smp3Mmc3: SEQ ID NO:10; CrpMmc3: SEQ ID NO:13.

[0044] FIG. 6 shows an amino acid sequence alignment of the Mmc3 zinc finger domain, where the conserved cysteines are marked above the alignment. Sequences shown are, top to bottom: BdMmc3: SEQ ID NO:1; SfpMmc3: SEQ ID NO:15; PcMmc3: SEQ ID NO:7; SfMmc3: SEQ ID NO:2; SvMmc3: SEQ ID NO:3; Sv2Mmc3: SEQ ID NO:17; ObpMmc3: SEQ ID NO:14; Smp2Mmc3: SEQ ID NO:12; NapMmc3: SEQ ID NO:4; SfpMmc3: SEQ ID NO:15; NoMmc3: SEQ ID NO:6; No2Mmc3: SEQ ID NO:16; ShMmc3: SEQ ID NO:5; SmpMmc3: SEQ ID NO:11; Smp3Mmc3: SEQ ID NO:10; CrpMmc3: SEQ ID NO:13.

[0045] FIG. 7 depicts the evolutionary relationship of Mmc3 effectors to other known Type V Effector proteins. Shown is a maximum-likelihood phylogenetic tree based on an amino acid alignment of all known Type V CRIPSR effector proteins using MUSCLE. Cpf1 sequences were taken from Zetsche et al. (2015) Cell 163: 759-771. C2c1 and C2c3 sequences were taken from Shmakov et al. 2015 Molecular Cell, 60(3), 385-397 and CasX and CasY sequences were taken from Burstein et al. 2017 Nature, 1-20. Bootstrap values were derived from 100 pseudoreplicates and show high support for Mmc3 as an evolutionary distinct Type V CRISPR system.

[0046] FIG. 8 illustrates a radial representation of the evolutionary tree, showing the relationship of Mmc3 with other Type V Effector families Labels for a subset of strains and high-support is recovered for Mmc3 representing a distinct monophyletic clade within Type V CRISPR systems.

[0047] FIG. 9 shows schematics of the depletion assay for quantifying targeted DNA cleavage activity of CRISPR/Cas and determining PAM preferences using a 6N PAM library.

[0048] FIG. 10 gives an overview of the workflow for quantifying targeted DNA cleavage activity of CRISPR/Cas and determining PAM preferences using a 6N PAM library.

[0049] FIG. 11 illustrates the vectors and components of plasmid depletion assays used to discover Mmc3 PAM preferences and demonstrate targeted DNA cleavage activity. Top: Low copy vector for expression of Effectors under control of the Ptet promoter. Middle: Low copy vector expressing a minimal synthetic CRISPR array composed on a spacer sequence (Spacer 1) flanked by system specific CRISPR repeat sequences. Bottom: Target plasmid encoding a protospacer matching Spacer 1 sequence flanked by a 5′ N6 PAM library, or specific PAM sequence.

[0050] FIGS. 12A-12D FIG. 12A) shows PAM enrichment scores represented as SeqLogos for the Mmc3 family member SvMmc3. A 5′ TTN sequence is indicated as the top predicted PAM and is consistent across both biological and technical replicates. B) shows PAM enrichment scores represented as SeqLogos for the Mmc3 family member SfMmc3. A 5′ TTN sequence is indicated the top predicted PAM and is consistent across both biological and technical replicates. C) shows PAM enrichment scores represented as SeqLogos for the Mmc3 family member NoMmc3. A 5′ CTN sequence is indicated as the top predicted PAM and is consistent across both biological and technical replicates. D) shows PAM enrichment scores represented as SeqLogos for BdMmc3. A 5′ CTN or 5′ TTN sequence is indicated as the top predicted PAM depending on biological replicate. Results are consistent between technical replicates.

[0051] FIG. 13 provides a schematic illustration of an assay to quantify targeted DNA cleavage activity of CRISPR/Cas systems using target plasmids with specific PAM sequences.

[0052] FIG. 14 illustrates PAM dependence of DNA interference activities for the following Mmc3 systems: BdMmc3, NoMmc3, SfMmc3 and SvMmc3. Mmc3 systems were assessed for DNA-interference activity by comparing transformation frequencies of target plasmids encoding the following 5′-PAM sequences flanking the targeted protospacer (Sp1): 1) 5′-TTTT 2) 5′-ATTC 3) 5′-ACTC 4) 5′-TATC 5) 5′-TCTC 6) 5′-GTTC 7) 5′ TTTC 8) 5′ GGGG. In addition, a non-targeted protospacer (Sp2) control was performed. Relative reduction in transformation frequency compared to non-target control indicates activity of system for RNA-guided DNA interference. From this analysis, BdMmc3 and NoMmc3 and SfMmc3 activity profile is consistent with a 5′-HTN PAM, whereas SfMmc3 activity profile us consistent with a 5′-TTV PAM.

[0053] FIG. 15 shows target specific DNA interference activities of the Mmc3 systems relative to AsCpf1: BdMmc3, NoMmc3, SfMmc3, SvMmc3 and AsCpf1. The designation “Correct Target” indicates plasmids which encode a protospacer that matches the guide RNA spacer sequence (Sp1), whereas the “Incorrect Target” plasmid encode a protospacer that is mismatched with the guide RNA spacer sequence (Sp2). The relative reduction in transformation frequency between “Correct” and “Incorrect” target experiments indicates activity of system for RNA-guided DNA interference. Both target plasmids encode the 5′ TTTC PAM sequence shown to support activity of Mmc3 systems and AsCpf1. From this analysis, all Mmc3 systems show 3-4 log reduction on transformation frequency for the correct target relative to the incorrect target. BdMmc3 and SfMmc3 are more active for DNA cutting in the E. coli bioassay relative to AsCpf1.

[0054] FIGS. 16A and 16B shows target specific DNA interference activities of the Mmc3 systems: NapMmc3, ShMmc3, PcMmc3, Smp3Mmc3, Smp3Mmc2, SfpMmc3, and ObpMmc3, CrpMmc3, SmpMmc3, and AsCpf1. The designation “Correct Target” indicates plasmids which encode a protospacer that matches the guide RNA spacer sequence (Sp1), whereas the “Incorrect Target” plasmid encode a protospacer that is mismatched with the guide RNA spacer sequence (Sp2). The relative reduction in transformation frequency between “Correct” and “Incorrect” target experiments indicates activity of system for RNA-guided DNA interference. Both target plasmids encode the 5′ TTTC PAM sequence shown to support activity of Mmc3 and AsCpf1 systems.

[0055] FIGS. 17A-17D depicts the results of RNAseq in determining the sequence of the processed guide RNA of four Mmc3 systems. Small RNA from cells expressing both an Mmc3 effector and a minimal CRIPSR array was purified and sequenced. Trimmed reads are shown mapped to the CRISPR array and report on guide RNA processing by Mmc3 systems.

[0056] FIGS. 17E-17G shows diagrams of constructs encoding various configurations of guide RNAs used to validate predictions for guide RNA processing by Mmc3. Activity associated with various guide RNA constructs was assessed with plasmid interference assays and are reported in bar graph form.

[0057] FIGS. 18A and 18B depicts a construct for expressing multiple processed guide RNAs from a single CRISPR array in the presence of an Mmc3 effector. The ability to cleave multiple targets utilizing these guide RNAs was validated using plasmid interference assays with different target plasmids design to hybridize with the different guide RNAs. Results are presented in bar graph form.

[0058] FIG. 19 is a diagram of the E. coli rpoB locus with the guide (spacer) sequences tested for ability to support targeted genomic cleavage by CRISPR effectors. Associated PAM sequences are also indicated.

[0059] FIGS. 20A-20D provides the results of chromosomal targeting assays using the BdMmc3 and NoMmc3 effectors as well as known Type V (AsCpf1) and Type II (SpCas9) effectors using guide RNAs having the spacer sequences diagramed in FIG. 19. Reductions in transformation frequency indicates lethality associated with cleavage of the E. coli chromosome.

[0060] FIGS. 21A and 21B provides a diagram of the repair plasmid that includes a repair fragment encoding mutations for rifR and ablation of the target site as well as a sequence encoding the guide RNA for targeting the rpoB locus in E. coli. Target site ablation and system specificity was validated by showing that a guide RNA encoding the mutations (rpoB-Sp2-EDIT) in the repair template did not support activity in the plasmid interference assay. Also tested were the original rpoB-Sp2 guide RNA, rpoB-sp2 guide RNA construct with REPAIR fragment and a non-targeting guide RNA control.

[0061] FIG. 22 provides the results of testing Mmc3 for CRISPR-assisted editing of the rpoB locus for using a repair fragment encoding mutations for RifR. Frequencies of RifR due to spontaneous mutation, recombination and CRISPR-assisted editing are shown for BdMmc3 and Cas9 relative to neg. controls without CRISPR effectors. BdMmc3 increases the effective frequency of RifR clones 3-4 orders of magnitude over recombination frequencies in the absence of Mmc3.

[0062] FIG. 23 shows alleles of representative RifR clones derived from the experiment in FIG. 22. Clones derived from populations harboring Mmc3 and the repair plasmid have the expected mutation spectrum, whereas clones from neg. controls show signatures of spontaneous mutation, or Wt sequence.

[0063] FIG. 24 shows the results of plasmid interference assays where particular amino acids of the RuvC motifs of the BdMmc3 effector were mutated to alanine. An AsCpf1 ruvC mutant is also shown as a positive control.

[0064] FIG. 25 is a schematic diagram of the beta-galactosidase assay for measuring repression of transcriptional activity by nuclease deficient Mmc3 effectors mutated in the catalytic domain

[0065] FIGS. 26A-26D are graphs showing the reduction in LacZ (beta-galactosidase) activity, measured as absorbance at 420 nm, of E. coli expressing nuclease-deficient mutants dAsCpf1 (A and C) and dBdMmc3 (B and D) that were co-expressed with guide RNAs targeting LacI and LacZ genes in E. coli.

[0066] FIG. 27 shows the results of plasmid interference assays where cysteine residues of the zinc finger domain of Mmc3 effectors SfMmc3 and NoMmc3 were mutated to alanine.

[0067] FIG. 28 is a schematic diagram of the assay used to detect Mmc3-mediated nucleic acid modification in yeast, where the guide RNA was delivered into cells expressing the Mmc3 effector.

[0068] FIG. 29 provides bar graphs of the assay used to targeted nucleic acid modification in yeast cells expressing the BdMmc3 effector and the NoMmc3 effector as well as control Type II (AsCpf1) and Type V (SpCas9) effectors.

[0069] FIG. 30 provides bar graphs of the assay used to targeted nucleic acid modification in yeast cells expressing the BdMmc3 effector, the NoMmc3 effector, the Smp2Mmc3 effector, the ShMmc3 effector, the SfMmc3 effector, and the SfpMmc3 effector, as well as control Type II (AsCpf1) and Type V (SpCas9) effectors.

[0070] FIGS. 31A-31D depicts the assay used to detect Mmc3-mediated nucleic acid modification in yeast cells. A) is a schematic diagram of a components for testing chromosomal editing with Mmc3 effectors in yeast using exogenously supplied guide RNA. Yeast expressing the Mmc3 effector is transformed with two in vitro transcribed guide RNAs, a repair template and a transformation selection plasmid. B) is a schematic diagram showing Mmc3-dependent cleavage at chromosomal sites T1 and T3 is repaired by homologous recombination to generate an ˜200 bp deletion that is subsequently detected by PCR. C) Provides gels showing the results of chromosomal editing in S. cerevisiae with the BdMmc3 effector and exogenous guide RNA. Colony PCR spanning the predicted cut sites gives product about ˜200 smaller when repaired by homologous recombination with repair template. Top gels, control: Cells transformed with only dsDNA repair fragment and no guide RNA do not show evidence for introduction of the deletion by homologous recombination. Bottom gels, guide RNA dependent editing: Cells transformed with both guide RNA and repair template show 3/96 clones with the predicted ˜200 bp deletion demonstrating BdMmc3-dependent editing of the yeast chromosome. D) Sequencing confirmation of BdMmc3-dependent editing. PCR products from 31C (H11, A05, B03 and - Ve control) were sequenced and aligned to the S. cerevisiae genome. All three edited clones show the correct deletion predicted by the homologous recombination with the repair template, whereas the negative control showed the wild type sequence.

[0071] FIGS. 32A-32B, FIG. 32A) is a schematic diagram of the protocol for testing chromosomal editing with Mmc3 in yeast using in vivo expressed guide RNA to generate a deletion at chromosomal cut site T3. B) provides photographs of gels showing chromosomal editing in S. cerevisiae with BdMmc3 and in vivo expressed guide RNA. Colony PCR spanning the predicted cut sites gives product approximately 200 bp smaller when repaired by homologous recombination with the repair template. Upper gel: cells transformed with BdMmc3 guide RNA and repair template show 18 of 22 clones with the predicted deletion. Lower gel: cells transformed with non-cognate Cas9 guide RNA and repair template show only bands of wild type size.

[0072] FIGS. 33A-33B, FIG. 33A) is a schematic diagram of the protocol for testing chromosomal editing with Mmc3 in yeast using in vivo expressed guide RNA to generate an insertion at chromosomal cut site T3. B) is a gel for analyzing chromosomal editing in S. cerevisiae with BdMmc3 and in vivo expressed guide RNA. Colony PCR spanning the predicted cut sites gives product about 700 bp larger when repaired by homologous recombination with repair template encoding insertion. (Top, experiment) Cells transformed with BdMmc3 guide RNA and repair template show 4/19 clones with predicted insertion. (Bottom, control) Cells transformed with non-cognate Cas9 sgRNA and repair template show only wild type sequence.

[0073] FIG. 34 is a schematic of a protocol to test chromosomal editing with Mmc3 in mammalian cells. Cells expressing a cell surface marker, such as CD46, are transfected with a plasmid that expressed Mmc3 as a 2a-GFP fusion and a cognate guide RNA array targeting the cell surface marker gene. Targeted disruption of the cell surface marker gene, results in loss of the marker from the cell surface as a function of growth. FACS is used to identify edited cells that both express Mmc3 (GFP+) and have lost the cell surface marker (CD46 −).

[0074] FIG. 35 is a diagram showing guide RNA processing by Mmc3 in mammalian cells demonstrated by RNAseq. Small RNA was purified from cells expressing an Mmc3 effector and guide RNA array. Sequencing and alignment to the guide RNA template showed evidence of guide RNA processing for, SfMmc3, NoMmc3 and BdMmc3. The arrows indicate the 5′ processing site that results in a 18-19 nt CR repeat instead of the full length 36 bp repeat encoded in the guide RNA array. Mmc3s were able to process the 3′ end of the guide RNA array to yield a spacer sequence typically ranging from 20 to 28 nt. BdMmc3 demosntrates more restricted processing of the 3′ end of the guide RNA consistent with results from E. coli RNAseq analysis of BdMmc3 guide RNA.

[0075] FIG. 36A-36B, FIG. 36A) provides a diagram of the construct used to express a guide RNA in the alga Nannochloropsis. Ribozyme sequences in the construct catalyze cleavage into a “processed” guide seqeunce. B) provides the construct for expressing the BdMmc3 effector in Nannochloropsis along with the BSD selectable marker, a guide RNA, and GFP.

[0076] FIG. 37 is a photograph of a gel showing cutting of a plasmid that includes a target sequence in a mammalian cell lysate by the AsCpf1 and Smp2Cpf1 effectors in the presence and absence of the Mmc3 ORF3 polypeptide.

[0077] FIG. 38 is a photograph of a gel showing a time course of digestion by Smp2Cpf1 effector produced in a cell lysate with ORF3 polypeptide added to the assay (left half of photograph) and without ORF3 polypeptide added to the assay (right half of photograph).

[0078] FIG. 39 is a photograph of a gel separating products of 30 minute assays of AsCpf1 and Smp2Cpf1, with and without added Mmc3 ORF3 polypeptide. Analysis of band intensities provides that the presence of the ORF3 polypeptide resulted in 1.6 fold the control (no ORF3 polypeptide present) amount of cutting when AsCpf1 was used as the effector, and 9-fold the control level of cutting when Smp2Cpf1 was the effector.

### DETAILED DESCRIPTION OF THE INVENTION

[0079] Polypeptides having nucleic acid cleavage activity in prokaryotic and eukaryotic cells are disclosed herein. These polypeptides are useful in engineered CRISPR-Cas systems where they can generate programmable double stranded breaks (DSBs) at defined locations in a target nucleic acid sequence, either in vivo or in vitro. Upon generation of DSBs at specific sites within the genome in a living cell, cellular DNA repair mechanisms can act on the cleaved genomic sequences which provides for in situ gene editing. The nucleases described herein are components of a new family of Class 2 Type V CRISPR systems referred to as Mmc3.

[0080] CRISPR/Cas systems are generated using Mmc3 family nucleases and are expressed in a living cell, where the expressed components (namely the guide RNA and any associated Cas proteins, including the effector nuclease) are non-naturally occurring entities introduced into the cell as DNA for a certain specific gene altering function to be achieved. Typically for engineered use, Cas genes other than the effector are not required for activity. The elements of this system are designed as custom, ex-vivo, and highly specific elements, where a spacer sequence (or guide sequence) of choice is encoded as a guide RNA, where the guide RNA has a desirable secondary structure and can effectively bind to the target DNA, the spacer or guide sequence having complementarity with a corresponding sequence in the genome or episomal DNA of the organism where the CRISPR/Cas system is introduced, and can also bind to the Cas nuclease to direct the designated DNA cleavage. The guide RNA may be processed and may further contain at least a partial repeat sequence. The Mmc3 nuclease effectively and efficiently cleaves the genome of the host cell in which it is expressed at the predetermined region as guided and specified by the guide RNA. Unless defined otherwise, all technical and scientific terms used herein have the same meaning as commonly understood by one of ordinary skill in the art to which this invention belongs. In case of conflict, the present application including the definitions will control. Unless otherwise required by context, singular terms shall include pluralities and plural terms shall include the singular. All ranges provided within the application are inclusive of the values of the upper and lower ends of the range unless specifically indicated otherwise.

[0081] All publications, patents and other references mentioned herein are incorporated by reference in their entireties for all purposes as if each individual publication or patent application were specifically and individually indicated to be incorporated by reference.

[0082] The term “and/or” as used in a phrase such as “A and/or B” herein is intended to include “A and B”, “A or B”, “A”, and “B”.

[0083] “About” means either within 10% of the stated value, or within 5% of the stated value, or in some cases within 2.5% of the stated value, or, “about” can mean rounded to the nearest significant digit.

[0084] The term “guide RNA” refers to a polynucleotide sequence having a guide or spacer sequence (which may also be referred to as a targeting sequence), that has sufficient complementarity with a target nucleic acid sequence, to hybridize with the target nucleic acid sequence and direct sequence-specific binding of a nucleic acid-targeting complex to the target nucleic acid sequence. A guide sequence of a guide RNA is typically 18-25 nucleotides in length. A guide RNA also includes a sequence or sequences that interact with the effector protein that are derived from repeat sequences of CRISPR arrays (referred to as “CRISPR repeat sequences” or “repeat seqences”), but as used herein a guide RNA does not include tracr sequences—i.e., does not include sequences derived from tracr RNAs that are components of some CRISPR systems.

[0085] The invention provides a method for altering gene expression in a living cell, a eukaryotic cell, a prokaryotic cell, a cell in culture, or a cell within an organism, where the organism is a prokaryotic or eukaryotic organism, and can be, for example, an animal, plant, alga, labyrinthulomycete, or fungus. The Mmc3 nuclease system expands the potential of current CRISPR-based gene editing platforms, providing several advantages. For example, the Mmc3 family proteins are smaller in size compared to many other Type V effectors, which simplifies transfection, stability and expression. Additionally, some Mmc3 effectors have a more relaxed PAM requirement than the systems currently in use. For example, NoMmc3, BdMmc3 and SfMmc3 can accept an A, C or T in the third position (relative to the junction with the protospacer), whereas AsCpf1 and LbCpf1 are reported to require a T (Kim et al. 2017). NoMmc3, BdMmc3 and SfMmc3 can accept a T at the first position, whereas AsCpf1 and LbCpf1 cannot (Kim et al 2017). Additionally, some Mmc3 effectors only require a 3 bp PAM, instead of a 4 bp PAM like AsCpf1 and LbCpf1. In general, a more relaxed PAM sequence can be useful as it may allow more sites to be targeted per genome. Mmc3 CRISPR-Cas Systems

[0086] FIG. 1 shows the basic arrangement of genes and sequences for exemplary Mmc3 CRISPR loci. As shown, these loci can exhibit a variety of different architectures. The minimal structure includes an effector gene (Mmc3) and a CRISPR (CR) array. Several of the Mmc3 CRISPR systems (e.g., NoMmc3 and SfMmc3) encode Cas4, Cas1, and Cas2 genes; however the majority do not. The presence of Cas 4, Cas 1 and Cas 2 as accessory proteins is conserved among Type V CRISPR systems (see, Table 1). ORF 3 is a gene found only in Mmc3 systems to date; it is however not universally present in Mmc3 CRISPR systems. Also evident from Table 1 is the large overall amino acid sequence divergence in the effector polypeptides among the various Type V members. Upon comparison, the Cpf1 family (as represented by the members whose sequences are aligned in FIG. 5A) shows 18-43% sequence identity to a well characterized Cpf1 family member, FnCpf1. This range is higher (32-40% identity) if only active Cpf1 effectors are considered (See Zetsche et al. 2015). On the other hand Mmc3 members exhibit only about 8% to 11% identity with FnCpf1, which is comparable to the degree of identity between FnCpf1 and C2C3, CasX and CasY subtypes (Table 1).

TABLE 1
Comparison of Mmc3 to known Type V CRISPR systems

| | | | Cas | Aux. | | Effector | ID to |
|---|---|---|---|---|---|---|---|
| Sub-Type | tracr | RuvC | genes | Genes^{#} | PAM | size (aa) | FnCpf1 |
| Cpf1 | No | Yes | Cas4, 1, 2 | None | 5′ TTN/ | 1206-1373* | 32-40%** |
| | | | | | TTTN | | |
| C2c1 | Yes | Yes | Cas4-1, 2 | None | 5′ TTN/ | 1100-1500 | 6-8% |
| | | | | | ATTN | | |
| C2c3 | ? | Yes | Cas1* | None | ? | 1200-1300 | 8-10% |
| CasX | Yes | Yes | Cas4, 1, 2 | None | 5′ TTCN | 980 | 11-12% |
| CasY | No | Yes | Cas1* | None | 5′ TA | ~1200 | 7-10% |
| Mmc3 | No | Yes | Cas4, 1, 2* | Putative | 5′ HTN/ | 1033-1297 | 8-11% |
| | | | | | TTV | | |

*Not all systems have the canonical Cas gene architecture
**Based on systems demonstrated as functional by Zetsche et al 2015.
^{#}Defined as genes and their products that modify the DSB activity of the effector

[0087] Some CRISPR-Cas systems are dependent on an auxiliary RNA called traguide RNA, which is needed to facilitate the formation of Cas complexes with the guide RNA and bringing about the DNA cleavage, whereas other systems are traguide RNA independent. Cas9, C2c1, and CasX require an auxiliary traguide RNA for correct processing and loading of guide RNA into the effector protein. Mmc3 systems were assessed for the presence of traguide RNA by analyzing intergenic regions for sequence with partial complementarity to CRISPR repeat sequences. Suboptimal alignments failed to uncover strong evidence for an anti-repeat sequence typical of traguide RNA from other systems (i.e. Cas9, C2c1). In addition, assays of engineered Mmc3 systems (Examples 2, 3, 5, 6, 7, 8) demonstrate the lack of requirement for a traguide RNA. The Mmc3 family of nucleases are thus traguide RNA independent.

[0088] Among the various effector proteins used in CRISPR systems, Class 1 Cas systems comprise multiple subunit effector molecules. Class 2 effector proteins on the other hand, comprise single protein effector complex. Numerous Class 2 CRISPR systems have been described, including Cas9, Cpf1, C2c1, CasX and CasY. These Class 2 systems are defined minimally by i) a single large effector protein responsible for cleaving the target DNA, ii) a CRISPR array encoding targeting information. The Mmc3 family of nucleases are single protein effectors and would be considered a Class 2 system. The uniqueness of the effector protein has been a dominant criterion used by the field to classify and distinguish different CRISPR systems (See Zetsche et al. 2015, Shmakov et al 2015, Shmakov et al 2017 and Burstein et al 2017). According to the present classification, Class 1 CRISPR effectors are exemplified by Type I, III and IV systems. Class 2 CRISPR Effectors are of three distinct types: Type II and Type V systems target DNA, and Type VI systems target RNA. Cas9 would be exemplary of a Type II system, while Cpf1, C2c1, C2c3, Cas X and Cas Y are exemplary of Type V system members. The Mmc3 family of nucleases are Type V members.

[0089] Type V CRISPR effectors are typified by a C-terminal RuvC domain derived from transposon ORF-B, and the absence of an HNH domain seen in Type II (Cas9) enzymes. Cpf1 was the first Type V enzyme described and was unique relative to Cas9, given its use of a single guide RNA, that is, its function is independent of traguide RNA, its ability to process its own guide RNA, its generation of a staggered cut in the target DNA, and its requirement for a ‘T-rich’ PAM sequence. Additional Type V systems (C2c1, C2c3, CasX, CasY) are generally consistent with this description of Cpf1, although these systems are not as well characterized at the functional level. Other characteristics of Type V systems have been less generalizable. For instance, PAM sequences differ amongst Type V systems both within and between sub-types but in general are 5′ PAMs that are AT-rich, which is distinct from Type II (Cas9) PAMs which are 3′ G-rich sequences. CRISPR array repeat sequences can also differ markedly within and between subtypes.

[0090] The Mmc3 family of nucleases are generally characterized by the presence of a noncontiguous RuvC catalytic domain, the absence of a HNH domain, the absence of a nuc domain, the lack of a requirement for tracr RNA, an affinity for T-rich PAM sequences, and the presence of a zinc finger domain characterized by two cysteine pairs located between RuvC motifs II and III. Of particular note is the unique sequences and spacing of the RuvC I, II and III sequences of the Mmc3 family Table 4 shows Mmc3 effectors have unique consensus sequences across all three RuvC sub-domains in comparison to other known effector proteins. Consensus sequence of class 2 CRISPR Effectors, consisting of RuvC catalytic motifs and surrounding residues, were derived from the representative sequences of each sub-type listed in FIG. 5A and FIG. 5B.

[0091] In addition to having a very low overall sequence identify to other known Type V effector proteins, the Mmc3 family effector proteins are characteristically smaller in size compared to many other effectors. Cas9 proteins are typically larger than Type V Effectors with median length of ˜1350 aa (based on reference sequences compared in FIG. 5).

### Mmc3 Effector Proteins

[0092] Mmc3 CRISPR systems include Mmc3 effector proteins or genes encoding Mmc3 effector proteins, where “Mmc3 effector protein” “Mmc3 effector” “Mmc3 RNA-guided nuclease” “Mmc3 nuclease” or in some cases “Mmc3 polypeptide” are all used herein to refer to the RNA-guided endonuclease cas protein of a naturally-occurring Class 2, Type V Mmc3 CRISPR system and variants thereof. As described in detail in Example 1, the Mmc3 family of RNA-guided nucleases is demonstrated by bioinformatic analysis to form a distinct family within the Class 2 Type V CRISPR effectors. For example, the all-by-all blast analysis described in Example 1 and depicted diagramatically in FIG. 10 shows that members of the Mmc3 family cluster together on the basis of sequence homology. Mmc3 effectors are tracr-independent: when complexed with a guide RNA that includes a guide sequence and sequences derived from CRISPR array repeat sequences an Mmc3 effector cleaves double-stranded DNA in the absence of a traguide RNA or a tracr sequence.

[0093] Mmc3 effectors include a noncontiguous RuvC domain that comprises three RuvC motifs and do not include an HNH domain (present in Cas9, a Type II effector) or a nuc domain (characteristic of Cpf1, a Type V effector), but do include a zinc finger domain having four cysteine residues (see Example 1).

[0094] The spacing of the three noncontiguous RuvC motifs of the RuvC domain of Mmc3 effectors is distinctive, where the RuvC I motif and RuvC II motif are separated by more that 125 amino acids and the RuvCII motif and RuvCIII motif are separated by fewer than 225 amino acids. The spacing between RuvC I and RuvC II of Mmc3 effectors ranges from 125 amino acids to about 350 amino acids, and the spacing between RuvC II and RuvC III of Mmc3 effectors ranges from about 25 amino acids to 225 amino acids. For example, the spacing between RuvC I and RuvC II can range from 150 amino acids to about 325 amino acids or from 175 amino acids to about 300 amino acids, and the spacing between RuvC II and RuvC III can range from about 50 amino acids to 200 amino acids or from about 75 amino acids to 175 amino acids. This spacing of RuvC motifs is different from that of Cpf1 effectors, for example, that have a shorter spacing between motifs I and II and a longer spacing between motifs II and III, and C2c1, which has a longer spacing between motifs I and II (see Table 5).

[0095] Mmc3 effectors also have a zinc finger domain that is positioned between the RuvCII and RuvCIII motifs of Mmc3 effector proteins. This domain is characterized by two pairs of cysteine residues, where the cysteine residues of the first pair (referred to herein as the first and second cysteine residues) are separated by two intervening amino acids and the cysteine residues of the second pair (referred to herein as the third and fourth cysteine residues) are separated by between two and five intervening amino acids (FIGS. 7A and 7B). There are several conserved residues in the vicinity of the cysteine pairs, for example, there is a phenylalaline residue at position “−10” with respect to the first cysteine; a valine or isoleucine at position “−9” with respect to the first cysteine; and the amino acid immediately following (C-terminal to) the first cysteine is proline (P) and/or the two amino acids at positions “−4” and “−3” are threonine and serine, respectively. As disclosed in Example 7, mutation of the cysteine residues of the first cysteine pair to alanine abolishes Mmc3 effector activity.

[0096] In various embodiments of engineered or non-naturally occurring CRISPR-Cas systems provided herein the Mmc3 effector polypeptide can comprise:

[0097] an amino acid sequence selected from the group consisting of SEQ ID NO:1, SEQ ID NO:2, SEQ ID NO:3, SEQ ID NO:4, SEQ ID NO:5, SEQ ID NO:6, SEQ ID NO:7, SEQ ID NO:8, SEQ ID NO:9, SEQ ID NO:12, SEQ ID NO:16, SEQ ID NO:17, SEQ ID NO:18, SEQ ID NO:19, SEQ ID NO:20, SEQ ID NO:21, SEQ ID NO:22, SEQ ID NO:23, SEQ ID NO:24, SEQ ID NO:25, and SEQ ID NO:26; or a variant of an Mmc3 effector comprising an amino acid sequence having at least 60%, 65%, 70%, 75%, 80%, 85%, 90%, or 95% identity to an amino acid sequence selected from the group consisting of SEQ ID NO:1, SEQ ID NO:2, SEQ ID NO:3, SEQ ID NO:4, SEQ ID NO:5, SEQ ID NO:6, SEQ ID NO:7, SEQ ID NO:8, SEQ ID NO:9, SEQ ID NO:12, SEQ ID NO:16, SEQ ID NO:17, SEQ ID NO:18, SEQ ID NO:19, SEQ ID NO:20, SEQ ID NO:21, SEQ ID NO:22, SEQ ID NO:23, SEQ ID NO:24, SEQ ID NO:25, and SEQ ID NO:26; or

[0098] a naturally-occurring Mmc3 effector comprising an amino acid sequence having at least 50%, 55%, 60%, 65%, 70%, 75%, 80%, 85%, 90%, or 95% identity to an amino acid sequence selected from the group consisting of SEQ ID NO:1, SEQ ID NO:2, SEQ ID NO:3, SEQ ID NO:4, SEQ ID NO:5, SEQ ID NO:6, SEQ ID NO:7, SEQ ID NO:8, SEQ ID NO:9, SEQ ID NO:16, SEQ ID NO:17, SEQ ID NO:18, SEQ ID NO:19, SEQ ID NO:20, SEQ ID NO:21, SEQ ID NO:22, SEQ ID NO:23, SEQ ID NO:24, SEQ ID NO:25, and SEQ ID NO:26.

[0099] For example, an engineered or non-naturally occurring CRISPR-Cas system provided herein the Mmc3 effector polypeptide can comprise:

[0100] an amino acid sequence selected from the group consisting of SEQ ID NO:1, SEQ ID NO:2, SEQ ID NO:3, SEQ ID NO:4, SEQ ID NO:5, SEQ ID NO:6, SEQ ID NO:7, SEQ ID NO:12, SEQ ID NO:16, SEQ ID NO:17, SEQ ID NO:20, SEQ ID NO:23, SEQ ID NO:24, and SEQ ID NO:25; or

[0101] a variant of an Mmc3 effector comprising an amino acid sequence having at least 60%, 65%, 70%, 75%, 80%, 85%, 90%, or 95% identity to SEQ ID NO:1, SEQ ID NO:2, SEQ ID NO:3, SEQ ID NO:4, SEQ ID NO:5, SEQ ID NO:6, SEQ ID NO:7, SEQ ID NO:16, SEQ ID NO:17, SEQ ID NO:20, SEQ ID NO:23, SEQ ID NO:24, or SEQ ID NO:25; or

[0102] a naturally-occurring Mmc3 effector having at least 50%, 55%, 60%, 65%, 70%, 75%, 80%, 85%, 90%, or 95% identity to SEQ ID NO:1, SEQ ID NO:2, SEQ ID NO:3, SEQ ID NO:4, SEQ ID NO:5, SEQ ID NO:6, SEQ ID NO:7, SEQ ID NO:16, SEQ ID NO:17, SEQ ID NO:20, SEQ ID NO:23, SEQ ID NO:24, or SEQ ID NO:25.

[0103] In further examples, an engineered or non-naturally occurring CRISPR-Cas systems provided herein the Mmc3 effector polypeptide can comprise:

[0104] an amino acid sequence selected from the group consisting of SEQ ID NO:1, SEQ ID NO:2, SEQ ID NO:3, SEQ ID NO:5, SEQ ID NO:6, and SEQ ID NO:7; or

[0105] a variant of an Mmc3 effector comprising an amino acid sequence having at least 60%, 65%, 70%, 75%, 80%, 85%, 90%, or 95% identity to SEQ ID NO:1, SEQ ID NO:2, SEQ ID NO:3, SEQ ID NO:5, SEQ ID NO:6, or SEQ ID NO:7; or

[0106] a naturally-occurring Mmc3 effector having at least 50%, 60%, 65%, 70%, 75%, 80%, 85%, 90%, or 95% identity to SEQ ID NO:1, SEQ ID NO:2, SEQ ID NO:3, SEQ ID NO:5, SEQ ID NO:6, or SEQ ID NO:7.

### Guide RNAs

[0107] The term “guide RNA” refers to an RNA that includes a guide sequence that has homology with a target sequence (sometimes referred to as a “protospacer”, where the guide sequence can be referrred to as the “spacer”) and additional sequence that allows for interaction of the guide RNA with the effector protein, which may be referred to as the “handle” of the guide, and is derived from CRISPR repeats, so may also be referred to as the repeat sequence of the guide. As used herein, the term guide RNA encompasses guide RNAs (plural). In the CRISPR systems provided herein, a guide RNA may not include tracr sequences. Some CRISPR systems require tracrRNA sequences, but the Mmc3 and Cpf1 systems disclosed herein are tracr-independen. (A guide RNA that does include tracr systems may be referred to as a “chimeric guide RNA” or a “single guide RNA” or “sgRNA”.) The degree of complementarity between a guide sequence and a target sequence, when optimally aligned using a suitable alignment algorithm, may vary and is commonly at least 50%, 60%, 75%, 80%, 85%, 90%, 95%, 97.5%, 99%, or is about 100% identical to the target sequence. Optimal alignment may be determined with the use of any suitable algorithm for aligning sequences, non-limiting example of which include the Smith-Waterman algorithm, the Needleman-Wunsch algorithm, algorithms based on the Burrows-Wheeler Transform (e.g., the Burrows Wheeler Aligner), ClustalW, Clustal X, BLAT, Novoalign (Novocraft Technologies; available at www.novocraft.com), ELAND (Illumina, San Diego, Calif.), SOAP (available at soap.genomics.org.cn), and Maq (available at maq.sourceforge.net). The ability of a guide sequence (within a nucleic acid-targeting guide RNA) to direct sequence-specific binding of a nucleic acid-targeting complex to a target nucleic acid sequence may be assessed by any suitable assay. For example, the components of a nucleic acid-targeting CRISPR system sufficient to form a nucleic acid-targeting complex, including the guide sequence to be tested, may be provided to a target cell having the corresponding target nucleic acid sequence, such as by transfection with vectors encoding the components of the nucleic acid-targeting complex, followed by an assessment of preferential targeting (e.g., cleavage) within the target nucleic acid sequence. Similarly, cleavage of a target nucleic acid sequence may be evaluated in vitro by providing the target nucleic acid sequence, components of a nucleic acid-targeting complex, including the guide sequence to be tested and a control guide sequence different from the test guide sequence, and comparing binding or rate of cleavage at the target sequence between the test and control guide sequence reactions. Other assays are possible, and will occur to those skilled in the art. A guide sequence, and hence a nucleic acid-targeting guide RNA may be selected to target any target nucleic acid sequence. The target sequence may be DNA or RNA such as messenger RNA (mRNA), pre-mRNA, ribosomal RNA (rRNA), transfer RNA (tRNA), micro-RNA (miRNA), small interfering RNA (siRNA), small nuclear RNA (snRNA), small nucleolar RNA (snoRNA), double stranded RNA (dsRNA), non-coding RNA (ncRNA), long non-coding RNA (IncRNA), and small cytoplasmatic RNA (scRNA).

[0108] A guide RNA can include a repeat sequence that can be between about 15 and 50 nt in length, more commonly between about 16 and about 40 nt in length, and may be between about 17 nt and about 38 nt in length for some exemplary Mmc3 systems. The repeat sequence in the Mmc3 CRISPR systems disclosed herein is followed by (is 5′ to) the guide, or spacer, sequence that may be between about 17 and 35 nt in length, more typically between about 17 and about 30 nt in length, or between about 18 and about 25 nt in length. A guide construct can be derived from or designed to replicate the organization of a CRISPR array (CRarray), where a spacer is flanked by repeat sequences. In some examples, a CRarray construct can be engineered to have two or more spacers (guide sequences) that are typically of between about 17 and about 25 nt in length that are separated by CRISPR repeat sequences from about 15 to about 50 nucleotides in length. Alternatively a guide RNA construct can encode a “processed guide”, where the construct includes a repeat sequence of that may be from about 15 to about 30 nucleotides in length, for example, from about 17 to about 28 nucleotides in length, followed by a guide sequence that may be between about 15 and about 35 nt in length, more typically between about 17 and about 25 nt in length. CRISPR systems as provided herein can in some embodiments include constructs for expressing a guide RNA in a host cell that include multiplex guide constructs, where a CRarray includes two or more different spacer sequences. In some alternative embodiments, CRISPR systems as provided herein can include multiple guide RNAs that can target different sites that can be introduced into a target cell.

### ORF3 Polypeptides

[0109] As disclosed herein, ORF3 polypeptides are encoded by an open reading frame associated with several Mmc3 CRISPR loci (see, for example, FIG. 1). Without limiting the invention to any particular mechanism, ORF3 polypeptides may enhance the activity of a CRISPR effector, such as but not limited to an Mmc3 effector or a Cpf1 effector. For example, inclusion of an Mmc3 ORF3 polypeptide or a nucleotide sequence encoding an Mmc3 ORF3 polypeptide in a CRISPR-Cas system, such as but not limited to an Mmc3 CRISPR-Cas system or a Cpf1 CRISPR-Cas system, can result in an enhanced rate of DNA modification by the Mmc3 or Cpf1 CRISPR-Cas system. A Cpf1 effector used with an Mmc3 ORF3 polypeptide can be any Cpf1 effector or variant thereof, such as any descibed in US 2016/0208243 and US 2017/0233756, both of which are incorporated herein by reference. Exemplary Cpf1 effectors that may be used for modifying a target nucleic acid molecule in a system that includes an Mmc3 ORF3 polypeptide are the AsCpf1 effector (SEQ ID NO:81) and the Smp2Cpf1 effector (SEQ ID NO:200).

[0110] An Mmc3 ORF3 polypeptide used in any of the compositions and methods disclosed herein, including an ORF3 polypeptide encoded by an ORF3 gene used in any of the methods and compositions disclosed herein, can be any Mmc3 ORF3 polypeptide, e.g., any ORF3 polypeptide encoded by an ORF3 gene associated with an Mmc3 locus (see, for example, FIG. 1 providing the organization of several Mmc3 CRISPR loci, including the No2Mmc3, NoMmc3, SfMmc3. ShMmc3, Sv2Mmc3, and SvMmc3 loci, where ORF3 is proximal to (and downstream of) the Mmc3 effector gene). An Mmc3 ORF3 gene can be further be identified by relatedness of the encoded polypeptide to the ORF3 polypeptide sequences disclosed herein. For example, an ORF3 polypeptide encoded by an ORF3 gene of an Mmc3 locus can have at least 30%, at least 35%, at least 40%, at least 45%, at least 50%, at least 55%, at least 60%, at least 65%, at least 70%, at least 75%, at least 80%, at least 85%, at least 90%, or at least 95% amino acid sequence identity to an ORF3 polypeptide sequence such as any disclosed herein (e.g., an Mmc3 ORF3 polypeptide that comprises an amino acid sequence of SEQ ID NO:50, SEQ ID NO:51, SEQ ID NO:52, SEQ ID NO:53, SEQ ID NO:54, SEQ ID NO:55, SEQ ID NO:56, SEQ ID NO:57, or SEQ ID NO:58). In additional examples, an ORF3 polypeptide can include an amino acid sequence having at least 60%, at least 65%, at least 70%, at least 75%, at least 80%, at least 85%, at least 90%, at least 95%, at least 96%, at least 97%, at least 98%, at least 99% identity to a naturally-occurring ORF3 polypeptide, such as but not limited to any disclosed herein, for example, SEQ ID NO:50, SEQ ID NO:51, SEQ ID NO:52, SEQ ID NO:53, SEQ ID NO:54, SEQ ID NO:55, SEQ ID NO:56, SEQ ID NO:57, or SEQ ID NO:58. FIG. 2A-C provides an alignment of full-length ORF3 polypeptide sequences of the No2, No, No3, Sf, Sv2, Sv3, and Sv mMc3 CRISPR loci. One of skill in the art could readily see areas where the identity of amino acids is highly conserved, less conserved, or not conserved and therefore be guided in generating or testing any variants. In some embodiments, an ORF3 polypeptide used in the compositions and/or methods provided herein can include an ORF3 polypeptide comprising an amino acid sequence having at least 30%, at least 35%, at least 40%, at least 45%, at least 50%, at least 55%, at least 60%, at least 65%, at least 70%, at least 75%, at least 80%, at least 85%, at least 90%, at least 95%, at least 96%, at least 97%, at least 98%, at least 99% identity to any of SEQ ID NO:50, SEQ ID NO:51, SEQ ID NO:52, SEQ ID NO:53, SEQ ID NO:54, SEQ ID NO:55, SEQ ID NO:56, SEQ ID NO:57, or SEQ ID NO:58.

[0111] An ORF3 polypeptide, or a polynucleotide sequence encoding an ORF3 polypeptide, can be included in any CRISPR Cas system, including any of those disclosed herein. In various embodiments for in vivo editing, a cell may be engineered to express an Mmc3 ORF3 polypeptide, for example, may include a polynucleotide sequence encoding an Mmc3 polypeptide operably linked to a regulatory element, such as a promoter.

[0112] As demonstrated herein, an Mmc3 ORF3 polypeptide (or gene encoding an Mmc3 ORF3 polypeptide) used in the systems and methods provided herein can be an ORF3 polypeptide (or a gene encoding an ORF3 polypeptide) derived from a different CRISPR locus or can be derived from a different species from the CRISPR locus or species the effector protein or effector protein gene used in the systems or methods is derived from. For example, a CRISPR-Cas system as provided herein can include a gene encoding an Mmc3 effector and a gene encoding an Mmc3 ORF3 polypeptide, wherein the Mmc3 effector and Mmc3 ORF3 polypeptide are derived from different CRISPR loci of the same or a related species, or the Mmc3 effector and Mmc3 ORF3 polypeptide can be derived from different species, that may be, for example, derived from species of different genera. Further, an ORF3 gene or polypeptide can be used with a non-Mmc3 CRISPR effector, such as, for example, a Cpf1 effector. In some embodiments, an engineered, non-natural CRISPR-Cas system includes: an engineered or non-naturally-occurring CRISPR-Cas system having a polynucleotide sequence that encodes an engineered guide RNA comprising a guide sequence operably linked to a regulatory element, and an Mmc3 effector or a nucleic acid molecule encoding an Mmc3 effector operably linked to a regulatory element, and further includes an Mmc3 ORF3 polypeptide or or a nucleic acid molecule encoding an Mmc3 ORF3 polypeptide operably linked to a regulatory element.

### Engineered Mmc3 CRISPR-Cas Systems

[0113] An engineered or non-naturally-occurring CRISPR gene editing system as provided herein includes a guide RNA or a nucleotide sequence encoding a guide RNA, and an Mmc3 effector or a polynucleotide including a nucleotide sequence encoding an Mmc3 effector. The Mmc3 effector can by any Mmc3 effector, including but not limited to Mmc3 effectors that include the amino acid sequences of any of SEQ ID NOs:1-24, orthologs thereof, or variants thereof having at least 60% identity thereto. In various embodiments, the Mmc3 effector comprises an amino acid sequence selected from the group consisting of: BdMmc3 (SEQ ID NO:1); SfMmc3 (SEQ ID NO:2); SvMmc3 (SEQ ID NO:3); NapMmc3 (SEQ ID NO:4); ShMmc3 (SEQ ID NO:5); NoMmc3 (SEQ ID NO:6); PcMmc3 (SEQ ID NO:7); Sf2Mmc3 (SEQ ID NO:8); Sf3Mmc3 (SEQ ID NO:9); No2Mmc3 (SEQ ID NO:16); Sv2Mmc3 (SEQ ID NO:17); Rz2Mmc3 (SEQ ID NO:20); Rz3Mmc3 (SEQ ID NO:21); RzMmc3 (SEQ ID NO:22); Sf4Mmc3 (SEQ ID NO:23); Sv3Mmc3 (SEQ ID NO:24); Sf8Mmc3 (SEQ ID NO:25); and No3Mmc3 (SEQ ID NO:26); or comprises a variant of any thereof having at least 60% identity to any of SEQ ID NO:1, SEQ ID NO:2, SEQ ID NO:3, SEQ ID NO:4, SEQ ID NO:5, SEQ ID NO:6, SEQ ID NO:7, SEQ ID NO:8, SEQ ID NO:9, SEQ ID NO:16, SEQ ID NO:17, SEQ ID NO:20, SEQ ID NO:21, SEQ ID NO:22, SEQ ID NO:23, SEQ ID NO:24, SEQ ID NO:25, or SEQ ID NO:26; or comprises a natually-occurring Mmc3 polypeptide having at least 50%, at least 55%, at least 60%, at least 65%, at least 70%, at least 75%, at least 80%, at least 85%, at least 90%, or at least 95% to any of SEQ ID NO:1, SEQ ID NO:2, SEQ ID NO:3, SEQ ID NO:4, SEQ ID NO:5, SEQ ID NO:6, SEQ ID NO:7, SEQ ID NO:8, SEQ ID NO:9, SEQ ID NO:16, SEQ ID NO:17, SEQ ID NO:20, SEQ ID NO:21, SEQ ID NO:22, SEQ ID NO:23, SEQ ID NO:24, SEQ ID NO:25, or SEQ ID NO:26. Mmc3 effectors of the systems disclosed herein can have, for example, at least 60%, at least 65%, at least 70%, at least 75%, at least 80%, at least 85%, at least 90%, at least 95%, at least 96%, at least 97%, at least 98%, or at least 99% to SEQ ID NO:1, SEQ ID NO:2, SEQ ID NO:3, SEQ ID NO:5, SEQ ID NO:6, or SEQ ID NO:7. In further examples an Mmc3 effector of a CRISPR system as disclosed herein can have at least 60%, at least 65%, at least 70%, at least 75%, at least 80%, at least 85%, at least 90%, at least 95%, at least 96%, at least 97%, at least 98%, or at least 99% to SEQ ID NO:1, SEQ ID NO:2, SEQ ID NO:3, or SEQ ID NO:6. One of skill in the art can be guided by knowledge of conservative amino acid substitution, sequence alignments, crystal structures of effector proteins, and functional assays, such as but not limited to the plasmid interference assays detailed in the examples herein to assess the suitability of variants.

[0114] The Mmc3 effector can include a nuclear localization sequence (NLS) at the N-terminus, the C-terminus or both. In some embodiments, a vector encodes an Mmc3 effector comprising one or more nuclear localization sequences (NLSs), such as about or more than about 1, 2, 3, 4, 5, 6, 7, 8, 9, or 10 NLSs. In some embodiments, the RNA-modifying effector protein comprises about or more than about 1, 2, 3, 4, 5, 6, 7, 8, 9, 10, or more NLSs at or near the amino-terminus, about or more than about 1, 2, 3, 4, 5, 6, 7, 8, 9, 10, or more NLSs at or near the carboxy-terminus, or a combination of these (e.g., zero or at least one or more NLS at the amino-terminus and zero or at one or more NLS at the carboxy terminus). When more than one NLS is present, each may be selected independently of the others, such that a single NLS may be present in more than one copy and/or in combination with one or more other NLSs present in one or more copies. In some embodiments, an NLS is considered near the N- or C-terminus when the nearest amino acid of the NLS is within about 1, 2, 3, 4, 5, 10, 15, 20, 25, 30, 40, 50, or more amino acids along the polypeptide chain from the N- or C-terminus. The effector sequence and the NLS may in some embodiments be fused with a linker between 1 to about 20 amino acids in length.

[0115] Non-limiting examples of NLSs include an NLS sequence derived from: the NLS of the SV40 virus large T-antigen; the NLS from nucleoplasmin (e.g., the nucleoplasmin bipartite NLS); the c-myc NLS; the hRNPA1 M9 NLS; the IBB domain from importin-alpha; the NLS sequences of the myoma T protein, the p53 protein; the c-ab1 IV protein, or influenza virus NS1; the NLS of the Hepatitis virus delta antigen, the Mx1 protein; the poly(ADP-ribose) polymerase; and the steroid hormone receptors (human) glucocorticoid. In general, the one or more NLSs are of sufficient strength to drive accumulation of the RNA-modifying Mmc2 effector protein in a detectable amount in the nucleus of a eukaryotic cell.

[0116] The nucleotide sequence encoding the Mmc3 effector can optionally be codon optimized for a host of interest. (For reference, see Kim C. et al., Gene 1997, Vol 199, pages 293-301; Mauro V. et al., Trends Mol. Med., 2014, Vol. 20, pages 604-613.) Additional possible modifications include sequence modifications for improved function, such as but not limited to changing effector glycosylation sites.

[0117] In various embodiments, a polynucleotide that encodes an Mmc3 polypeptide includes a regulatory element, such as a promoter, operably linked to the sequence that encodes the Mmc3 polypeptide. Exemplary variations of the foregoing include a regulatory element selected from the group consisting of: CMV, RSV, SV40, EF1a, human beta actin, chicken beta actin, CAG, Ubc, TRE, UAS, Polyhedrin, CaMKIIa, GAL1, TEF, Ac5, GDS, ADH1, CaMV35S, Ubi, U6 and H1. The regulatory element is suitable for driving expression of an encoded polypeptide in a prokaryotic cell or a eukaryotic cell. Various embodiments of the latter contemplate a regulatory element suitable for driving expression of an encoded polypeptide in an animal cell, such as but not limited to a mammalian cell, or in a photosynthetic organism, such as a plant and algal cell.

[0118] In certain embodiments, the engineered CRISPR system includes a guide RNA expression cassette. One or more engineered guide RNAs can be expressed and processed from an Mmc3 array or a portion thereof that includes a guide (targeting) sequence, typically an engineered or designed guide sequence, as a spacer sequence and is introduced into a target cell. In some embodiments, the expression vector includes a nucleotide sequence encoding a processed guide RNA sequence, such as a processed guide RNA sequence based on RNAseq analysis of a processed guide RNA structure, e.g., of E. coli engineered to include at least a portion of an Mmc3 array and effector. For example, one or more guide RNAs can be expressed from a construct that encodes a guide RNA that includes a guide (targeting) sequence fused to at least a portion of a repeat sequence of an Mmc3 array or a sequence derived from a repeat sequence of an Mmc3 array (see FIG. 3A). The guide sequence having homology to the target sequence can be, for example between seventeen and twenty-seven nucleotides in length, for example, between eighteen and twenty-five nucleotides in length or between about eighteen and about twenty-three nucleotides in length. The CRISPR repeat sequence included in the guide RNA guide or construct can be between about 16 and about 30 nucleotides in length, such as between about seventeen and about twenty-five nucleotides in length, or between about eighteen and about tweny-three nucleotides in length and can be fused to the 5′ end or 3′ end of the guide sequence. In various examples the sequence derived from an Mmc3 repeat sequence is fused to the 5′ end of the spacer, or targeting sequence. The guide RNA (guide RNA) encoding sequence can be operably linked to a promoter operable in the target cell such as a U6 promoter.

[0119] An exemplary engineered Class 2 CRISPR system includes e.g, a guide RNA or nucleic acid molecule for expressing a guide RNA, where the guide RNA is designed to target a nucleic acid molecule of interest, and an Mmc3 effector polypeptide or a nucleic acid molecule encoding an Mmc3 effector polypeptide, where the guide RNA or nucleic acid encoding the guide RNA and Mmc3 effector or nucleic acid molecule encoding the Mmc3 effector may be introduced into a target cell or tissue simultaneously or sequentially. The guide RNA (or guide RNA or CRISPR array) and effector module may be introduced into the cell as polynucleotides, e.g., DNA or RNA or both, although administration of polypeptide forms of the effector are also useful, as well as combinations of polypeptides and polynucleotides (such as a nucleic acid guide sequence and a nuclease enzyme, which may be complexed prior to delivery).

[0120] Mmc3 CRISPR systems can also function in vitro. For example, an Mmc3 effector gene can be cloned into an expression vector for a specific host system such as E. coli. A range of E. coli hosts and vectors designed for protein expression are known to the art (e.g. pET systems, pMAL systems, pBAD systems). An epitope tag may be included as a translational fusion to the N or C-terminus, or both. Examples of tags include His, Strep, and Maltose Binding Protein (MBP), as nonlimiting examples. Purification of the Mmc3 effector can be performed using methods known in the art, for example, using the manufacturer's instructions if a commercially available expression vector is used, and may depend on the specific expression and epitope combination utilized. To perform an in vitro nuclease assay, purified Mmc3 effector and an in vitro transcribed guide RNA (guide RNA) compatible with the Mmc3 effector can be combined in a suitable buffer. The guide RNA is designed to include a spacer sequence that hybridizes to the desired target sequence. After combining the Mmc3 and guide RNA, target DNA which can be, for example, a PCR product, plasmid DNA, or genomic DNA or a fragment of any thereof, is added to the reaction mixture. After a period of incubation at the optimal temperature for the enzyme, the target DNA is recovered and analyzed for cleavage at the targeted site.

[0121] In one aspect, the engineered Mmc3 CRISPR system is for modifying a nucleic acid molecule in a plant cell. The methods include introducing Mmc3 CRISPR system as described herein to target one or more plant genes to confer desired traits on essentially any plant. A wide variety of plants and plant cell systems may be engineered to include a non-naturally occurring Mmc3 CRISPR system using the nucleic acid constructs and various transformation methods known in the art (See Guerineau F., Methods Mol Biol. (1995) 49:1-32). In preferred embodiments, target plants and plant cells for engineering include, but are not limited to, those monocotyledonous and dicotyledonous plants, such as crops including grain crops (e.g., wheat, maize, rice, millet, barley), fruit crops (e.g., tomato, apple, pear, strawberry, orange), forage crops (e.g., alfalfa), root vegetable crops (e.g., carrot potato, sugar beets, yam), leafy vegetable crops (e.g., lettuce, spinach); flowering plants (e.g., petunia, rose, chrysanthemum), conifers and pine trees (e.g., pine fir, spruce), plants used in phytoremediation (e.g., heavy metal accumulating plants); oil crops (e.g., sunflower, rape seed) and plants used for experimental purposes (e.g., Arabidopsis). Thus, the methods and Mmc3 CRISPR systems can be used over a broad range of plants, such as for example with dicotyledonous plants belonging to the orders Magniolales, Miciales, Laurales, Piperales, Aristochiales, Nymphaeales, Ranunculales, Papeverales, Sarraceniaceae, Trochodendrales, Hamamelidales, Eucomiales, Leitneriales, Myricales, Fagales, Casuarinales, Caryophyllales, Batales, Polygonales, Plumbaginales, Dilleniales, Theales, Malvales, Urticales, Lecythidales, Violales, Salicales, Capparales, Ericales, Diapensales, Ebenales, Primulales, Rosales, Fabales, Podostemales, Haloragales, Myrtales, Cornales, Proteales, San tales, Rafflesiales, Celastrales, Euphorbiales, Rhamnales, Sapindales, Juglandales, Geraniales, Polygalales, Umbellales, Gentianales, Polemoniales, Lamiales, Plantaginales, Scrophulariales, Campanulales, Rubiales, Dipsacales, and Asterales. The methods and Mmc3 CRISPR systems can also be used with monocotyledonous plants such as those belonging to the orders Alismatales, Hydrocharitales, Najadales, Triuridales, Commelinales, Eriocaulales, Restionales, Poales, Juncales, Cyperales, Typhales, Bromeliales, Zingiberales, Arecales, Cyclanthales, Pandanales, Arales, Lilliales, and Orchid ales, or with plants belonging to Gymnospermae, e.g those belonging to the orders Pinales, Ginkgoales, Cycadales, Araucariales, Cupressales and Gnetales.

[0122] An Mmc3 system can also be used to modify genomes of microorganisms, including fungii, Labyrinthulomycetes, and algae. In some embodiments, the microorganism used for genome modification is a photosynthetic microorganism. In some embodiments, the photosynthetic microorganism is a eukaryotic microalga. In some embodiments, the eukaryotic microalga is a species of Achnanthes, Amphiprora, Amphora, Ankistrodesmus, Asteromonas, Boekelovia, Borodinella, Botryococcus, Bracteococcus, Chaetoceros, Carteria, Chlamydomonas, Chlorococcum, Chlorogonium, Chlorella, Chroomonas, Chrysosphaera, Cricosphaera, Crypthecodinium, Cryptomonas, Cyclotella, Dunaliella, Ellipsoidon, Emiliania, Eremosphaera, Ernodesmius, Euglena, Franceia, Fragilaria, Gloeothamnion, Haematococcus, Halocafeteria, Hymenomonas, Isochrysis, Lepocinclis, Micractinium, Monoraphidium, Nannochloris, Nannochloropsis, Navicula, Neochloris, Nephrochloris, Nephroselmis, Nitzschia, Ochromonas, Oedogonium, Oocystis, Ostreococcus, Pavlova, Parachlorella, Pascheria, Phaeodactylum, Phagus, Picochlorum, Platymonas, Pleurochrysis, Pleurococcus, Prototheca, Pseudochlorella, Pseudoneochloris, Pyramimonas, Pyrobotrys, Scenedesmus, Schizochlamydella, Skeletonema, Spyrogyra, Stichococcus, Tetrachorella, Tetraselmis, Thalassiosira, Viridiella, or Volvox.

### Vectors

[0123] For in vivo editing, polynucleotides encoding the guide RNA and/or the effector are commonly incorporated into vectors for introduction into target cells. “Vector” as used herein refers to a recombinant DNA or RNA plasmid or virus that comprises a heterologous polynucleotide capable of being delivered to a target cell, either in vitro, in vivo or ex-vivo. The heterologous polynucleotide can comprise a sequence of interest and can be operably linked to another nucleic acid sequence such as promoter or enhancer and may control the transcription of the nucleic acid sequence of interest. As used herein, a vector need not be capable of replication in the ultimate target cell or subject. The term vector may include expression vector and cloning vector.

[0124] Vectors include, but are not limited to, nucleic acid molecules that are single-stranded, double-stranded, or partially double-stranded; nucleic acid molecules that comprise one or more free ends, no free ends (e.g., circular, relaxed or supercoiled); nucleic acid molecules that comprise DNA, RNA, or both; and other varieties of polynucleotides known in the art. An exemplary vector is a plasmid, into which additional DNA segments can be inserted, such as by standard molecular cloning techniques. Another type of useful vector is a viral vector, wherein virally-derived DNA or RNA sequences are present in the vector for packaging into a virus (e.g., retroviruses, replication defective retroviruses, adenoviruses, replication defective adenoviruses, and adeno-associated viruses). Viral vectors also include polynucleotides carried by a virus for transfection into a target cell. Certain vectors are capable of autonomous replication in a host cell into which they are introduced (e.g., bacterial vectors having a bacterial origin of replication and episomal mammalian vectors). Other vectors (e.g., non-episomal mammalian vectors) are integrated into the genome of a target cell upon introduction into the cell, and thereby are replicated along with the host genome. Other genomes appropriate to target include e.g., chloroplast, mitochondrial, plastid, bacteriophage and viral genomes. Certain vectors are capable of directing the expression of genes to which they are operatively-linked. Such vectors are commonly referred to as expression vectors. It will be appreciated by those skilled in the art that the selection and design of the vector will depend on such factors as the choice of target cell to be transformed, the level of expression desired, whether constitutive or conditional expression is desired, whether stable or transient expression is desired, and other such factors that shall be apparent to a skilled artisan. Accordingly, the invention includes one or more of the Mmc3 family effector nucleases in a vector. Many vectors are suitable for cloning and expressing an Mmc3 family effector. A currently preferred vector will express an Mmc3 family polypeptide in a eukaryotic cell. Most preferred would be a vector suitable for expression of the nuclease in a mammalian, and even a human cell. Such vectors commonly include one or more regulatory elements, which can be constitutive or inducible, and would drive expression of an Mmc3 family polypeptide. Vectors designed for tissue specific expression are widely used, and within the scope of this invention.

[0125] Vectors can be designed for expression of CRISPR components (e.g. nucleic acid transcripts, proteins, or enzymes) in prokaryotic or eukaryotic cells. For example, CRISPR transcripts can be expressed in prokaryotic cells, for example bacterial cells such as Escherichia coli, or eukaryotic cells, such as yeast cells, insect cells (using baculovirus expression vectors), or mammalian cells. Typically, such an expression system will have a vector with a first regulatory element operably linked to a CRISPR RNA nucleotide sequence, and will express a guide RNA; and a second regulatory element operably linked to a polynucleotide sequence encoding a Mmc3 effector. Alternatively, one vector may encode the guide RNA, and another vector may encode an Mmc3 protein. A single vector encoding bicistronic elements encoding the guide RNA and the Mmc3 polypeptide is currently preferred. The vector system may include the full expression cassettes for a CRISPR/Mmc3 systems, that when expressed in the cell (prokaryotic or eukaryotic), provides for a single guide sequence that can hybridize to a target sequence that is 3′ to a Protospacer Adjacent Motif (PAM), and the guide RNA can form a complex with the Mmc3 effector polypeptide.

[0126] Promoter, enhancers and associated 5′- and 3′-regulatory elements useful for vectors are exemplified in Goeddel, GENE EXPRESSION TECHNOLOGY: METHODS IN ENZYMOLOGY 185, Academic Press, San Diego, Calif. (1990). The recombinant expression vector can be transcribed and translated in vitro, for example using T7 promoter regulatory sequences and T7 polymerase. Vectors may be introduced and propagated in a prokaryote to amplify copies of a vector to be introduced into a eukaryotic cell or as an intermediate vector in the production of a vector to be introduced into a eukaryotic cell. For example, bacterial expression systems involve a vector such a pBluescript, a pET, a pBAD, comprising a promoter and associated regulatory elements, transformation-competent bacteria, and transformation media, transformation methods and tools such as heat shock method or electroporator, and bacterial culture and growth media. (For reference, see Molecular Cloning: A Laboratory Manual, Vol. 1, Chapter 3, J. F. Sambrook and D. W. Russell, ed., Cold Spring Harbor Laboratory Press).

[0127] For eukaryotic recombinant expression vector systems, the vector choices span Adenoviral vectors, Adeno-associated virus (AAV) vectors, retroviruses vectors, Lentiviruses, MMLV, Piggybac viral vectors, and several other bacterial vectors. Vectors are readily available, where most vectors may be adapted towards an inducible expression system such as Tetracycline on-off vector systems, or towards constitutive expression systems, where the system may be designed for strong (high copy number) expression, such as using Cytomegalovirus (CMV) promoter, or mild to moderate copy number expression such as U6 or Ptet promoter, are well-known in the art. For reference, please see: An Introduction to Genetic Analysis. 7th edition. Griffiths A J F, Miller J H, Suzuki D T, et al. New York: W. H. Freeman; 2000; or, Molecular Cell Biology. 4th edition. Lodish H, Berk A, Zipursky S L, et al., New York: W. H. Freeman; 2000. In vivo and tissue-specific timed expressions may be achieved by using Cre-Lox systems (Reviewed in Duyne G., Annu Rev BioPhys Biomol Struct., 2001, 30: 87-104). For test purposes, the vectors may comprise a tag, such as green fluorescence protein, Renella luciferase system, a small molecule tag such as HA-tag or FLAG-tag, to assist in detection of expression. Alternatively, expression of the DNA in the recombinant vector expression cassette can be readily determined by routine methods such as quantitative reverse transcriptase PCR, sequencing or protein expression analyses.

[0128] Transfection of expression vectors in various cell types is available to one of skill in the art as a routine laboratory methodology. Additionally, predesigned and custom vector systems and protocols are available from various manufacturers. Optimized protocols for molecular cloning, transfection and expression procedures will be apparent to a skilled artisan in view of the teachings herein. Accordingly, the invention provides a cell having a transfected Mmc3 family nuclease, and/or an expression cassette having an Mmc3 family nuclease, that may further include additional CRISPR system elements. Currently preferred are mammalian and human cells having such vector systems.

[0129] Recombinant expression vectors comprise polynucleotides for expressing a Mmc3 polypeptide. The polynucleotide encoding an Mmc3 enzyme is operably linked to regulatory elements. Regulatory elements include 5′ and 3′ regulatory elements. The 5′ regulatory elements include a promoter, and optionally, an enhancer, and generally, all elements upstream to the gene which help in the control of the expression of the gene that is to be transcribed. In cases where expression of another protein is needed to control the promoter, such as in a Tet-on-off system, where expression of tetracycline is necessary for the promoter to become active or to become dormant as the system is designed, a separate vector may express the trans-element, such as tetracycline. The 5′-regulatory elements are generally constructed upstream of the first amino acid, methionine, encoded by the trinucleotide: AUG. In some cases the promoter may be directly upstream of the recombinant gene, in other cases it may be spaced by a few nucleotide bases. Predesigned vectors offer optimized expression systems where the recombinant gene and the vector are both digested with same restriction enzymes, or with enzymes that cleave at the same sites, (isoschizomers), the generate the cloning ends and ligate the complementary sticky nucleotide ends (generated by the restriction digest) of the vector and the insert (in this case the Mmc3 encoding gene), and ligate, thereby generating the expression vector comprising an Mmc3 expression cassette. The 3′-regulatory elements are usually stretches of polynucleotides which help in the processing of the RNA and the overall stability of the transcript. In general, 3′ untranslated regions (3′-UTRs) may be part of the insert where the 3′ segment of the gene of interest is present in the portion of polynucleotide to be clones into the vector, or a 3′-UTR element may be present universally as a part of the vector, in which case it is a heterologous 3′-UTR but serving the same essential functions.

[0130] As described above, the vector may contain a regulatory element. A “regulatory element” as used herein includes promoters, enhancers, internal ribosomal entry sites (IRES), and other expression control elements (e.g., transcription termination signals, such as polyadenylation signals and poly-U sequences). Such regulatory elements are described, for example, in Goeddel, GENE EXPRESSION TECHNOLOGY: METHODS IN ENZYMOLOGY 185, Academic Press, San Diego, Calif. (1990). Regulatory elements include those that direct constitutive expression of a nucleotide sequence in many types of host cell and those that direct expression of the nucleotide sequence only in certain host cells (e.g., tissue-specific regulatory sequences). A tissue-specific promoter may direct expression primarily in a desired tissue of interest, such as muscle, neuron, bone, skin, blood, specific organs (e.g., liver, pancreas), or particular cell types (e.g., lymphocytes). Regulatory elements may also direct expression in a temporal-dependent manner, such as in a cell-cycle dependent or developmental stage-dependent manner, which may or may not also be tissue or cell-type specific. Such regulatory element would be operably configured to express e.g., an Mmc3 effector polypeptide, or nucleic acid component(s). For example and without limitation, expression of an Mmc3 effector polypeptide in a human cells is accomplished using CMV expression vectors. In such example, a U6 promoter is fused to a guide RNA sequence. Other common regulatory elements useful in vectors having the adaptor module, CRISPR array or effector module include: pol I, II or pol III promoters such as U6 and H1, RSV LTR promoter and/or enhancer), CaMV promoter/enhancer, CMV promoter/enhancer, SV40 promoter, β-actin promoter, DHFR promoter, PGK promoter, and the EF1α promoter, R-U5′ segment in LTR of HTLV-I, SV40 enhancer, human beta actin, chicken beta actin, CAG, Ubc, TRE, UAS, Polyhedrin, CaMKIIa, GAL1, TEF, Ac5, GDS, ADH1, CaMV35S, Ubi, and others generally known to those of skill in the art.

[0131] A vector is introduced into a target cell or tissue. The method will depend on the particular vector used and the target cell. As described above, the adaptor module, guide RNA or guide RNA and the effector module may be introduced via nucleic acid, either DNA or RNA; either by plasmid or viral vectors. The guide RNA may be processed or unprocessed. The various components of the system may further be delivered alone or in combination, or the effector may be provided as a protein rather than a nucleic acid. For example, nucleic acid components comprising the guide RNA or guide RNA may be preassembled with an effector protein then introduced into the target cell. Alternatively, the various components of the system may further be delivered sequentially, for example an effector may be introduced into the target cell, either as a protein or as a nucleic acid sequence encoding the effector protein, that is, introduced in a fashion that is stable in host cell, e.g., permanently (under selective pressure), or extra-chromosomal element, or within the host genome, where it can be regulated/induced, or transiently, and the nucleic acid comprising the guide RNA may be introduced separately. By way of further illustration, one or more of the various components may be introduced to the cell, and expression of these may be induced in a selective manner One of skill in the art could determine alternative variations to achieve the ultimate combination of the system elements to form a functional complex.

[0132] Vectors for delivery of polynucleotides are commonly formulated into a delivery system, for example the vectors are delivered via particles, vesicles, or viral vectors. For example, exosomes or liposomes are common delivery vehicles for cellular transfection, and viral vectors such as adenovirus, lentivirus or adeno-associated virus (AAV) are capable of active infection of target cells. Electroporation provides another common transfection method. Sequencing can confirm successful transfection of target cells. Target cells that are useful for the present invention include plant cells, prokaryotic cells, and eukaryotic cells. Prokaryotic cells are exemplified by bacteria e.g., cyanobacteria and archaea; eukaryotic cells are exemplified by e.g., animal cells, plant cells, algae; unicellular or multicellular organisms and fungal cells. Currently preferred are animal cells such as mammalian cells and more particularly human cells or tissues, for example but not limited to somatic cells and stem cells or stem cell lines. Sequencing can confirm the presence of the transgene. Nuclease assays can confirm enzyme expression from the transgene and confirm function.

[0133] The guide RNA or guide RNA can be generated from the CRISPR array, which is composed of direct repeats flanking unique spacer sequences. After processing, individual spacer-repeat guide RNA sequences are complexed with an effector Cas protein such as one of the Mmc3 family nucleases of the present invention. Hybridization of the spacer with the complimentary protospacer target sequence directs the Mmc3 nuclease to cleave the target nucleic acid at a predetermined and specific location. As an additional layer of specificity, cleavage typically requires a Protospacer Adjacent Motif (PAM) either 5′ or 3′ of the protospacer sequence. In the Mmc3 systems disclosed herein, the PAM is 5′ of the target sequence.

[0134] In various embodiments, the Mmc3 effectors referred to herein encompass a homologue or an orthologue of an Mmc3 protein as disclosed herein. The terms “ortholog” and “homolog” are well known in the art. By means of further guidance, a homolog of a gene is related to the reference gene by descent from a common ancestral gene and the homologs typically are structurally similar, e.g., sequence homology; and an ortholog of a gene refers to a homologous gene derived from a common ancestral gene in which the genes have approximately similar function across species Homologs and orthologs may be identified by homology modelling (see, e.g., Greer, Science vol. 228 (1985) 1055, and Blundell et al. Eur J Biochem vol 172 (1988), 513) or “structural BLAST” (Dey F, Cliff Zhang Q, Petrey D, Honig B. Toward a “structural BLAST”: using structural relationships to infer function. Protein Sci. doi: 10.1002/pro.2225.). See also Shmakov et al. (2015) for application in the field of CRISPR-Cas loci. In particular embodiments, the homolog or ortholog of Mmc3 as referred to herein has a sequence homology or identity of at least 60%, more preferably at least 65%, even more preferably at least 70%, such as for instance at least 75% with an Mmc3 effector such as any disclosed herein. In further embodiments, the homolog or ortholog of an Mmc3 effector as disclosed herein has a sequence identity of at least 80%, at least 85%, at least 90%, or at least 95% with an Mmc3 effector as disclosed herein. Orthologs of Mmc3 may be found in organisms which include but is not limited to species of the genera Smithella, Candidatus, Sulfuricurvum Omnitrophica, and Porphyromonas, as nonlimiting examples.

[0135] Further considered for use in the systems and methods provided herein are Mmc3 effector variants, where a variant has one or more mutations and has a sequence identity of at least 60%, at least 65%, at least 70%, or at least 75% at least 80%, at least 85%, at least 90%, or at least 95% with an Mmc3 effector such as any disclosed herein.

### Methods of DNA Modification

[0136] CRISPR systems are useful for modifying gene sequences. Provided herein are methods of modifying a target nucleic acid molecule in vivo, where the method includes delivering to a cell comprising one or more nucleic acid molecules comprising one or more target nucleic acid sequences a non-naturally occurring or engineered composition that includes:
[0137] a) one or more polynucleotide sequences comprising one or more guide RNAs, or one or more polynucleotide sequences encoding one or more guide RNAs, wherein the one or more guide RNAs is designed to form a complex with the Mmc3 effector and designed to hybridize with a target nucleic acid sequences, and
[0138] b) an Mmc3 effector protein, or a nucleotide sequence encoding an Mmc3 effector protein; where the one or more guide RNAs form one or more complexes with the Mmc3 effector protein, resulting in cleavage of the one or targeted nucleic acid molecules thereby modifying the one or more target nucleic acid molecules. The percentage of target nucleic acid molecule modification using the method can be at least 5%. Where the modification is target nucleic acid cleavage, in vivo modification can be assessed, for example, by plamid interference assays as demonstrated herein. Where the cell into which the system components are delivered has active DNA repair mechanisms, DNA modification can include mutation of the DNA sequence at the target site, for example, by insertion or deletion of nucleotides. Mutations can be assessed by assays that include, for example, surveyor assays, DNA sequencing, PCR, gel electrophoresis, and/or phenotypic assays. In some examples, the system delivered to the target cells further includes a donor or repair fragment that allows a phenotypic assay for target site modification as illustrated for example in Example 6 herein.

[0139] In some embodiments, the percentage of modified target nucleic acid molecules can be assessed as the percentage of cleaved nucleic acid molecules, where the percentage of cleaved nucleic acid molecules using the methods is at least 5%. In various embodiments, the percentage of target nucleic acid molecule modification is at least 10%, at least 15%, at least 20%, at least 25%, at least 30%, at least 35%, at least 40%, at least 45%, at least 50%, at least 55%, at least 60%, at least 65%, at least 70%, at least 75%, at least 80%, at least 85%, at least 90%, or at least 95%. Target nucleic acid molecule cleavage can be assessed, for example, using assays such as plasmid depletion or interference assays, where the percentage calculated takes into account the background occurring in cells that include CRISPR-Cas systems that are identical except that they include an incorrect guide (spacer) sequence or PAM.

[0140] Accordingly, in various aspects the invention provides a gene editing method wherein, the method provides for delivering an engineered or non-naturally occurring Mmc3 CRISPR system to a cell containing a target gene including a target sequence, thereby cleaving the target sequence and thereby editing the target nucleic acid molecule or gene. In various embodiments of such methods, the effector and the guide RNA are delivered to the cell as polynucleotides. In the above methods, various additional embodiments provide for delivery of the vector to the cell via electroporation, transfection, conjugation, particle bombardment, lipofection, nucleofection, calcium phosphate precipitation, liposomes, peptide-mediated transformation, particles, or vesicles. In some embodiments, the vector is viral, and delivery of the polynucleotide is accomplished by infection of the cell. Exemplary viral vectors include adenovirus, lentivirus and adeno-associated virus (AAV).

[0141] In other embodiments, the effector is delivered to the cell as a polypeptide and the guide RNA is delivered to the cell as a polynucleotide. In some embodiments, the effector and guide RNA are complexed prior to cellular delivery. Delivery of proteins or nucleoprotein complexes can be via electroportaion, peptide-mediated delivery, particle bombardment, liposomes, or other methods.

[0142] In some embodiments of the method, an Mmc3 effector gene can be introduced into a cell and the cell expressing the Mmc3 effector gene can subsequently be transformed with at least one guide RNA molecule targeting a nucleic acid molecule in the cell, resulting in modification of the targeted nucleic acid molecule.

[0143] In various embodiments, the frequency of target nucleic acid modification can be at least 5%, at least 10%, at least 15%, at least 20%, at least 35%, at least 30%, at least 35%, at least 40%, at least 45%, at least 50%, at least 55%, at least 60%, at least 65%, at least 70%, at least 75%, at least 80%, at least 85%, at least 90%, at least 95%, or at least 98%. Target nucleic acid modification can be nucleic acid cleavage or mutation, where mutation at the site of cleavage by the effector polypeptide complex occurs via cellular DNA repair mechanisms. The target nucleic acid molecule can be episomal DNA or genomic DNA. The host cell can be a eukaryotic or prokaryotic host cell.

[0144] In some embodiments, the target nucleic acid molecule is further modified by the integration of a polynucleotide, e.g., a donor or repair nucleic acid molecule, into the cleaved target sequence. The donor molecule can optionally include a sequence encoding a selectable marker. The donor molecule can optionally include sequences on one or both ends that have homology to a genetic locus of interest to facilitate introduction of the donor DNA into the locus by homologous recombination.

[0145] The above methods provide for use of a RuvC domain containing effector polypeptide in a CRISPR/Cas system within a cell for altering gene expression in the cell. Specifically, but without limitation, the invention contemplates use of an Mmc3 effector polypeptide in a eukaryotic cell for altering a target gene sequence in the cell.

[0146] Further provided are CRISPR-Cas systems that include Mmc3 ORF3 polypeptides for increasing the efficiency of genome editing by effectors such as Mmc3 and Cpf1 effectors. In exemplary embodiments the Mmc3 ORF3 polypeptides have at least 30%, at least 35%, at least 40%, at least 45%, at least 50%, at least 55%, at least 60%, at least 65%, at least 70%, at least 75%, at least 80%, at least 85%, at least 90% or at least 95% identity to an amino acid sequence selected from the group consisting of SEQ ID NO:50, SEQ ID NO:51, SEQ ID NO:52, SEQ ID NO:53, SEQ ID NO:54, SEQ ID NO:55, SEQ ID NO:56, SEQ ID NO:57, or SEQ ID NO:58.

### EXAMPLES

### Example 1

### Identifying and Isolating Mmc3 Family Effectors

[0147] Mmc3 effector proteins were identified using bioinformatics analysis of genomes of species of Smithella, Sulfuricurvum, Porphyromonas, and Candidatus genera, as well as bacterial species of unknown genera. Various strategies were used including identification of contigs containing Cas1 and CRISPR array flanked by a large (>800 amino acid) protein of unknown function and identification of evolutionarily distant CRISPRs using Hidden Markov Models (HMM) of relevant effector types. Novel effectors were subsequently used as queries to perform BLAST searches of NCBI databases. Based on these methods, twenty-six Mmc3 systems were identified: eighteen complete systems encoding an effector and an associated CR array (e.g, FIG. 1), as well as eight partial or incomplete systems, of which three had complete Mmc3 effector genes identified (see Table 2).

[0148] To identify a new family of effectors, a Cas1 HMM was trained on a combination of proprietary and public protein sequence data (about 75.8 million proteins). HMMER v.3.1b2 was used to iteratively search the dataset for Cas1, updating the HMM each time. This process recapitulates the steps taken by jackhmmer (ebi.ac.uk/Tools/hmmer/search/jackhmmer). The loop runs five times or until the model converges, whichever comes first. The output of this search contained contigs very likely to contain Cas1. These contigs were run through PILER-CR v.1.06 to identify the subset likely to have CRISPR repeat sequences. Cas1 hits for which a known CRISPR effector (Cas3, Cas9, Cmr4, or Csm3) was detected within five genes were discarded. The results were searched for Cas1 genes in which the largest upstream gene was at least 800 amino acids in length. Mmc3 effectors NoMmc3 (SEQ ID NO:6) and SfMmc3 (SEQ ID NO:2) were discovered among these results. Subsequent Blastp analysis using the NoMmc3 (SEQ ID NO:6) and SfMmc3 (SEQ ID NO:2) effector sequences as queries against SGI-proprietary and public sequence databases recovered genes encoding BdMmc3 (SEQ ID NO:1), SvMmc3 (SEQ ID NO:3), NapMmc3 (SEQ ID NO:4), ShMmc3 (SEQ ID NO:5), PcMmc3 (SEQ ID NO:7), Sf2Mmc3 (SEQ ID NO:8), and Sf3Mmc3 (SEQ ID NO:9).

[0149] Discovered effector genes BdMmc3 (SEQ ID NO:221), SfMmc3 (SEQ ID NO:222), SvMmc3 (SEQ ID NO:223), NapMmc3 (SEQ ID NO:224), ShMmc3 (SEQ ID NO:225), and NoMmc3 (SEQ ID NO:226) were discovered in the context of complete Mmc3 effector systems that included an open reading frame encoding the effector protein and a CRISPR array (FIG. 1). An open reading frame unrelated to any previously identified polypeptide-encoding sequences in CRISPR loci and referred to herein as ORF3 was found in the CRISPR loci of multiple Mmc3 systems. ORF3 sequences are aligned in FIG. 2(A-C).

[0150] Also discovered were genes encoding a complete Mmc3 effector where the sequence of the Mmc3 CRISPR system was incomplete, including the PcMmc3 effector system that included a gene (SEQ ID NO:227) encoding a complete PcMmc3 effector (SEQ ID NO:7), the RzMmc3 effector system that included a gene (SEQ ID NO:242) encoding a complete RzMmc3 effector (SEQ ID NO:22), and the Sf8Mmc3 effector system that included a gene (SEQ ID NO:S) encoding a complete Sf8Mmc3 effector (SEQ ID NO:25). CRISPR systems where the uncovered effector gene was incomplete, providing only a partial protein sequence, include Sf2Mmc3 (partial gene sequence SEQ ID NO:228 encoding SEQ ID NO:8), Sf3Mmc3 (partial gene sequence SEQ ID NO:229 encoding SEQ ID NO:9), Bd2Mmc3 (partial gene sequence SEQ ID NO:238 encoding SEQ ID NO:18), Bd3Mmc3 (partial gene sequence SEQ ID NO:239 encoding SEQ ID NO:19), and Rz3Mmc3 (partial gene sequence SEQ ID NO:241 encoding SEQ ID NO:21). See, Table 2.

[0151] At least six additional Mmc3 effectors were identified by querying additional databases: Smp3Mmc3 (WP_039658699, SEQ ID NO:10); SmpMmc3 (KFO67988.1, SEQ ID NO:11); Smp2Mmc3 (MAEO01000208, SEQ ID NO:12); CrpMmc3 (LBTJ01000016, SEQ ID NO:13); ObpMmc3 (MHGE01000059, SEQ ID NO:14); and SfpMmc3 (WP_041148111, SEQ ID NO:15). See, Table 3.

[0152] Further, additional proprietary metagenomics sequence data was searched for Mmc3 effectors using a Hidden Markov model derived from multiple protein sequence alignments of the identified Mmc3 effectors. HMMER v.3.1b2 was again used, this time to iteratively search sequence data for new Mmc3 effectors, updating the HMM each time. This behavior recapitulates the steps taken by jackhmmer (ebi.ac.uk/Tools/hmmer/search/jackhmmer). The loop runs five times or until the model converges, whichever comes first. The output of this search contained contigs very likely to contain Mmc3 effectors or related proteins. Contigs were manually curated for the presence of Mmc3, CRISPR arrays, and accessory genes (e.g. cas1, cas2, ORF3). From this analysis, two additional complete Mmc3 systems (Sv2Mmc3, No2Mmc3) were discovered that minimally consist of a full length Mmc3-encoding sequence and CRISPR repeats (FIG. 1 and Table 2). The No2Mmc3 effector (SEQ ID NO:16) is approximately 57% identical to the NoMmc3 effector (SEQ ID NO:6), whereas the Sv2Mmc3 effector (SEQ ID NO:17) is approximately 94% identical to the SvMmc3 effector (SEQ ID NO:3). In addition to the No2Mmc3 and Sv2Mmc3 full length Mmc3 systems, a number of partial Mmc3 contigs were identified (Table 2; SEQ ID NOs:18, 19, 21, and 25 provide amino acid sequences encoded by partial effector genes) as well as additional systems where the complete Mmc3 effector gene was identified (encoding the Rz2Mmc3 (SEQ ID NO:20), RzMmc3 (SEQ ID NO:22), Sf4Mmc3 (SEQ ID NO:23), Sv3Mmc3 (SEQ ID NO:24), Sf8Mmc3 (SEQ ID NO:25), and No3Mmc3 (SEQ ID NO:26) effectors).

[0153] CRISPR arrays were detected using the bioinformatics software CRISPRdetect and CRISPRfinder: (brownlabtools.otago.ac.nz/CRISPRDetect/predict_crispr_array.html) and (crispr.i2bc.paris-saclay.fr/Server/). Each full length Mmc3 system has a CRISPR array proximal to the Mmc3 effector protein. Direction of Mmc3 CRISPR arrays was assessed bioinformatically using CRISPRdetect, CRISPRmap (rna.informatik.uni-freiburg.de/CRISPRmap/Input.jsp) and by direct analysis of the repeat secondary structure predictions. Alignment of CRISPR repeats shows a highly conserved 3′ region that is predicted to form a hairpin structure (see, FIG. 3A and FIG. 3B). The consensus sequence at the 3′ end of the repeat, ATTTCTACTDTTGTAGT (SEQ ID NO:44) is similar to that described in the Cpf1 CRISPR system (Zetsche et al. (2015) Cell, 163: 759-771), where the processed repeat of Mmc3 systems may differ from that of a Cpf1 system by only a single nucleotide.

TABLE 2
Mmc3 Systems

| | | | cds | | |
|---|---|---|---|---|---|
| | Polypeptide | Length | SEQ ID | | |
| Effector | SEQ ID NO | (aa) | NO | Description | Taxonomic Grouping |
| BdMmc3 | 1 | 1241 | 221 | Complete Mmc3 system | Bacteroidales |
| SfMmc3 | 2 | 1298 | 222 | Complete Mmc3 system | Sulfuricurvum sp. |
| SvMmc3 | 3 | 1285 | 223 | Complete Mmc3 system | Sulfuricurvum sp. |
| NapMmc3 | 4 | 1033 | 224 | Complete Mmc3 system | Bacteria |
| ShMmc3 | 5 | 1187 | 225 | Complete Mmc3 system | Smithella |
| NoMmc3 | 6 | 1172 | 226 | Complete Mmc3 system | Bacteria |
| PcMmc3 | 7 | 1270 | 227 | Full Mmc3 Effector, | Porphyromonas |
| | | | | incomplete system | |
| Sf2Mmc3 | 8 | 1040 | 228 | Partial Mmc3 Effector | Sulfuricurvum sp. |
| Sf3Mmc3 | 9 | 1042 | 229 | Partial Mmc3 Effector | Sulfuricurvum sp. |
| No2Mmc3 | 16 | 1177 | 236 | Complete Mmc3 system | Smithella sp. |
| Sv2Mmc3 | 17 | 1290 | 237 | Complete Mmc3 system | Sulfuricurvum sp. |
| Bd2Mmc3 | 18 | 447 | 238 | Partial Mmc3 Effector | No assignment |
| Bd3Mmc3 | 19 | 419 | 239 | Partial Mmc3 Effector | No assignment |
| Rz2Mmc3 | 20 | 1030 | 240 | Complete Mmc3 system | Candidatus |
| | | | | | Roizmanbacteria |
| Rz3Mmc3 | 21 | 470 | 241 | Partial Mmc3 Effector | Candidatus |
| | | | | | Roizmanbacteria |
| RzMmc3 | 22 | 1030 | 242 | Full Mmc3 Effector, | Candidatus |
| | | | | incomplete system | Roizmanbacteria |
| Sf4Mmc3 | 23 | 1258 | 243 | Complete Mmc3 system | Sulfuricurvum sp. |
| Sv3Mmc3 | 24 | 1297 | 244 | Complete Mmc3 system | Sulfuricurvum sp. |
| Sf8Mmc3 | 25 | 1291 | 245 | Full Mmc3 Effector, | Sulfuricurvum sp. |
| | | | | incomplete system | |
| No3Mmc3 | 26 | 1180 | 246 | Complete Mmc3 | No assignment |
| | | | | system | |

TABLE 3
Additional Mmc3 systems

| | Polypeptide | | | cds | | |
|---|---|---|---|---|---|---|
| | SEQ ID | Length | Protein | SEQ ID | | Source |
| Effector | NO | (aa) | Accession | NO | Gene region | Information |
| Smp3Mmc3 | 10 | 1084 | KIE18642 | 230 | JMED01000011 | Smithella sp. |
| | | | | | | SC_KO8D17 |
| SmpMmc3 | 11 | 1064 | KFO67988 | 231 | JQDQ01000121 | Smithella sp. |
| | | | | | | SCADC |
| Smp2Mmc3 | 12 | 1217 | none | 232 | MAEO01000208 | Smithella sp. M82 |
| CrpMmc3 | 13 | 1057 | KKQ38176 | 233 | LBTJ01000016 | Candidatus |
| | | | | | | Roizmanbacteria |
| | | | | | | bacterium |
| | | | | | | GW2011_GWA2_37_7 |
| ObpMmc3 | 14 | 1067 | OGX23684 | 234 | MHGE01000059 | Omnitrophica |
| | | | | | | WOR_2 bacterium |
| | | | | | | GWF2_38_59 |
| SfpMmc3 | 15 | 1232 | KIM12007 | 235 | JQIT01000003 | Sulfuricurvum sp. |
| | | | | | | PC08-66 |

[0154] Mmc3 systems were assessed for the presence of tracrRNA by analyzing intergenic regions for sequence with partial complementarity to CRISPR repeat sequences. Suboptimal alignments failed to uncover strong evidence for an anti-repeat sequence typical of tracrRNA from other systems (i.e. Cas9, C2c1). Based on this analysis, Mmc3 systems were considered unlikely to require accessory RNAs for their activity, e.g., a tracr RNA, as confirmed by subsequent experiments.

[0155] Mmc3 systems were found to be represented by a diverse set of system architectures (see, for example, FIG. 1). The minimal system included an Effector (Mmc3) and a CRISPR (Cr) array, where the CRISPR array includes two or more CRISPR repeats separated by unique spacer sequences. Several of the identified systems (e.g., NoMmc3 and SfMmc3) encode Cas4, Cas1 and/or Cas2 genes, however not all Mmc3 systems do, reinforcing that these Cas genes are not required for nuclease activity across the Mmc3 family. Nine of the identified systems were found to encode a conserved protein, referred to herein as ORF3, that has not been described in other CRISPR systems.

[0156] Overall sequence homology between Mmc3 effector proteins and effector proteins of other CRISPR systems is low, with Cpf1 effector proteins having the highest sequence identity to Mmc3 effectors at 8-12%. Sequence identity this low likely suggests differences in overall protein folding (Rost, 1999).

[0157] Multiple sequence alignments of Mmc3 with other Class 2 CRISPR Effectors (Cpf1, C2c1, C2c3, CasX, CasY, and Cas9) were of low quality but allowed for identification of the RuvC I and RuvC III catalytic motifs (defined in Aravind et al. (2000) Nucl Acids Res., 28: 3417-3432). The RuvC I and RuvC III regions of Mmc3 possess the known catalytic residues but show pronounced variation in surrounding residues known to play key roles in nuclease function. By contrast, whole-protein alignments were not sufficient to allow identification of the RuvC II domain of Mmc3, which is a strong predictor of DNA cleavage activity (Zetsche et al. (2015), ibid). Examination of crystal structures for Class II effector proteins (i.e., SpCas9, LbCpf1, AsCpf1, etc.) reveals a hydrophobic pocket around the active site formed by residues neighboring each of the three RuvC catalytic residues. The amino acid identity at these positions is not conserved but is limited to those with hydrophobic side chains. Based on this analysis, the RuvC II motif is more accurately defined by 3-4 hydrophobic residues directly before the catalytic glutamate and one hydrophobic residue two positions after the catalytic glutamate. The small size of the sequence motif and its limited conservation (hydrophobic residues, not specific amino acids) make identification of the RuvC II motif in Mmc3 difficult, but searching a multiple sequence alignment of more than ten Mmc3 sequences allowed for identification of RuvC II. Discovery of sufficient representatives of the Mmc3 sub-type was critical to generation of an accurate alignment and identification of the RuvC II domain. The location of the RuvC II motif within the Mmc3 protein is substantially different relative to the other Class II CRISPR effectors and partly explains the difficulty in identifying it using primary sequence alignments.

[0158] Like many other Class 2 CRISPR Effectors, the three active site motifs of the RuvC domain of Mmc3 are non-contiguously spread over the protein sequence. Similar to the Type V effectors Cpf1, C2c1, C2c3, CasX, and CasY, the three RuvC catalytic motifs of Mmc3 are all contained in the C-terminal region, whereas the RuvC of Cas9 is spread across the entire effector polypeptide sequence (shown schematically in FIG. 4). The spacing between RuvC catalytic motifs is different in each effector sub-type, with that of Mmc3 most closely resembling that of CasY. However, there is substantially more amino acid sequence between RuvC I and II in Mmc3 than in CasY (approximately 200 amino acids in Mmc3 and approximately 70 amino acids in CasY). Overall, the spacing and position of RuvC domains is different for all Type V sub-types, including Mmc3 (see Table 4). For example, the Mmc3 effectors disclosed herein, including BdMmc3 (SEQ ID NO:1), SfMmc3 (SEQ ID NO:2); SvMmc3 (SEQ ID NO:3); NapMmc3 (SEQ ID NO:4); ShMmc3 (SEQ ID NO:5); NoMmc3 (SEQ ID NO:6), No2Mmc3 (SEQ ID NO:16), Sv2Mmc3 (SEQ ID NO:17), Rz2Mmc3 (SEQ ID NO:20) have a spacing of greater than about 100 amino acids or greater than 125 amino acids (and can be greater than 150 amino acids, greater than 175 amino acids, or greater than 180 amino acids) and less than about 500 amino acids, less than 450 amino acids, less than 400 amino acids, or less than about 350 amino acids between the RuvC I and RuvC II motifs. Additionally, the Mmc3 effectors disclosed herein have a spacing between the RuvC II and RuvC III motifs of greater than about 40 amino acids, or greater than about 50, 60, 70, 80, or 90 amino acids but less than about 225 amino acids, less than about 200 amino acids, or less than about 175 amino acids.

TABLE 4
Spacing of RuvC domain motifs in Type V Effector sub-types
(number of amino acid residues between motifs)

| | N-terminal | Between | Between | | |
|---|---|---|---|---|---|
| | to | RuvC I | RuvC II | C-terminal to | Total |
| | RuvC I | and RuvC II | and RuvC III | RuvC III | length |
| Mmc3 | 773 | 225 | 130 | 10 | 1181 |
| Cpf1 | 885 | 72 | 247 | 36 | 1288 |
| C2c1 | 586 | 277 | 123 | 141 | 1174 |
| C2Cc3 | 937 | 79 | 185 | 17 | 1264 |
| CasX | 659 | 79 | 154 | 44 | 982 |
| CasY | 885 | 70 | 147 | 42 | 1190 |
| Cas9 | 6 | 739 | 211 | 364 | 1349 |

[0159] The consensus sequences of the catalytic RuvC motifs are listed in Table 5. The residues necessary for catalysis (D at position 6 in RuvC I, E at position 5 in RuvC II, and D at position 5 in RuvC III) are conserved in every example Amino acid position numbers for the Mmc3 RuvC I, RuvC II, and RuvC III motifs are as shown in FIG. 5. While the overall conservation in these motifs is similar between different sub-types, there are noticeable differences that are consistent with designation of Mmc3 as a distinct Type V CRISPR system.

[0160] In RuvC I, amino acids with large, hydrophobic side chains are conserved at position 1 for Mmc3, while other sub-types have amino acids with polar, uncharged (Cpf1, C2c3, and CasX) side chains or positively charged side chains (C2c1 and CasY). Mmc3 effectors show variation at several residues in RuvC I (position 7, 9 and 10) that are highly conserved in effectors of other sub-types. For example, at position 7, Cpf1 and CasX have a conserved arginine, C2c1, C2c3, CasY, and Cas9 have hydrophobic amino acids, while Mmc3 can have either. Mmc3 effectors also have a conserved glutamic acid or glutamine at RuvC I position 11 which is not seen in any of the other sub-types. In addition, position 14 of RuvC I is in all cases but one (NapMmc3) threonine or serine followed by a leucine at position 15, a combination not seen in other effector subtypes. With respect to RuvC II, in Mmc3 effectors, position 6 is a conserved aspartate in half the sequences and unconserved in the others while other sub-types have stricter conservation at this position (negatively charged amino acids in Cpf1 and C2c1, hydrophobic amino acids in CasY and Cas9). In RuvC III, some of the Mmc3 effectors have a histidine at position 2, which is only seen in Cas9 and has been shown to be involved in catalysis in other RuvC proteins. Some Mmc3 have aspartic acid at RuvC III position 6, which is not seen in any other sub-types, although C2c1 and CasX have glutamic acid at this position. At RuvC III position 7, Mmc3 effectors have either hydrophobic or polar, uncharged amino acids, while the other sub-types have one or the other (Cpf1, C2c1, C2c3, CasX, and CasY have polar, uncharged amino acids and Cas9 has hydrophobic amino acids). Most Mmc3 have a glutamic acid at RuvC III position 18, which is not seen in any other sub-type. Overall, Mmc3 effectors show unique RuvC domain spacing and consensus sequences relative to other known class 2 CRISPR effectors. Table 5 provides consensus sequences of Class 2 CRISPR effector RuvC catalytic motifs and surrounding residues.

TABLE 5
Consensus sequences of RuvC subdomains

| Sub-type | RuvC I | RuvC II | RuvC III |
|---|---|---|---|
| Mmc3 | XXXGIDXGXXELATLCV | XIXLEXL | XXXXDXXAAYNIAKXGXE |
| | (SEQ ID NO: 59) | (SEQ ID NO: 60) | (SEQ ID NO: 61) |
| Cpf1 | XIIGIDRGERNLLYXXX | IXVLEDL | PXDADANGAYXIALKGLX |
| | (SEQ ID NO: 62) | (SEQ ID NO: 63) | (SEQ ID NO: 64) |
| C2c1 | RVMSVDLGXRXAAAXSV | LILFEDL | XXHADINAAQNLQXRFWX |
| | (SEQ ID NO: 65) | (SEQ ID NO: 66) | (SEQ ID NO: 67) |
| C2c3 | XIVAIDLFEXXXGYAVF | FPVLEXX | XXHADENAAINIGRXYLX |
| | (SEQ ID NO: 68) | (SEQ ID NO: 69) | (SEQ ID NO: 70) |
| CasX | NLIGXDRFENIPAVIAL | XLXFENL | EXHADEQAALNIARSWLF |
| | (SEQ ID NO: 71) | (SEQ ID NO: 72) | (SEQ ID NO: 73) |
| CasY | XYXGIDIFEYGXAXXXX | KXXYEXE | XXDADIQAXXXIAXXXYX |
| | (SEQ ID NO: 74) | (SEQ ID NO: 75) | (SEQ ID NO: 76) |
| Cas9 | YSIGLDIGTNSVGWAVX | XIVVEMA | HHAHDAYLNAVIGXALLK |
| | (SEQ ID NO: 77) | (SEQ ID NO: 78) | (SEQ ID NO: 79) |

[0161] In addition to the distinct consensus sequences across all three RuvC subdomains, Mmc3 sequences share a unique positioning and spacing of these subdomains (Table 6). Generally, among the 21 Mmc3 effector sequences listed in Table 6, the RuvC I subdomain (17 residues) is found at amino acid position 650-900 range from the N-terminus, followed by a spacer amino acid stretch of 125-350 residues, followed by the RuvC II subdomain (7 residues), followed by a spacer amino acid stretch of 25-225 residues, followed by the RuvC III subdomain (18 residues) which is very proximal to the C-terminus (<25 residues).

TABLE 6
Analysis of positioning and spacing of domains of
Mmc3 effectors (amino acids)

| | | | Between | | |
|---|---|---|---|---|---|
| | | Between | RuvC II | | |
| | N-terminal | RuvC I and | and | C-terminal | |
| | to RuvC I | RuvC II | RuvC III | to RuvC III | Total |
| SfMmc3 (SEQ ID NO: 2) | 869 | 212 | 162 | 12 | 1297 |
| SvMmc3 (SEQ ID NO: 3) | 838 | 215 | 171 | 19 | 1285 |
| BdMmc3 (SEQ ID NO: 1) | 835 | 204 | 147 | 12 | 1240 |
| SfpMmc3 (SEQ ID NO: 15) | 842 | 199 | 143 | 6 | 1232 |
| Smp2Mmc3 (SEQ ID NO: 12) | 839 | 222 | 109 | 6 | 1217 |
| NoMmc3 (SEQ ID NO: 6) | 727 | 301 | 98 | 5 | 1172 |
| ShMmc3 (SEQ ID NO: 5) | 744 | 299 | 97 | 6 | 1187 |
| CrpMmc3 (SEQ ID NO: 13) | 691 | 210 | 110 | 14 | 1067 |
| ObpMmc3 (SEQ ID NO: 14) | 722 | 197 | 106 | 1 | 1067 |
| NapMmc3 (SEQ ID NO: 4) | 667 | 209 | 117 | 0 | 1033 |
| SmpMmc3 (SEQ ID NO: 11) | 695 | 206 | 115 | 6 | 1064 |
| Smp3Mmc3 (SEQ ID NO: 10) | 695 | 210 | 132 | 5 | 1084 |
| PcMmc3 (SEQ ID NO: 7) | 841 | 212 | 162 | 12 | 1269 |
| Sv2Mmc3 (SEQ ID NO: 17) | 842 | 215 | 172 | 19 | 1290 |
| No2Mmc3 (SEQ ID NO: 16) | 735 | 301 | 96 | 4 | 1177 |
| No3Mmc3 (SEQ ID NO: 26) | 731 | 302 | 98 | 7 | 1180 |
| RzMmc3 (SEQ ID NO: 22) | 690 | 208 | 109 | 6 | 1055 |
| Rz2Mmc3 (SEQ ID NO: 20) | 670 | 203 | 107 | 8 | 1030 |
| Sv3Mmc3 (SEQ ID NO: 24) | 830 | 214 | 172 | 39 | 1297 |
| Sf4Mmc3 (SEQ ID NO: 23) | 872 | 190 | 144 | 10 | 1258 |
| Sf8Mmc3 (SEQ ID NO: 25) | 863 | 211 | 163 | 12 | 1291 |
| Average | 773 | 225 | 130 | 10 | 1181 |
| Lowest | 667 | 190 | 96 | 0 | 1030 |
| Highest | 872 | 302 | 172 | 39 | 1297 |

[0162] The success in identifying all three RuvC catalytic motifs prompted searching for other functional domains in Mmc3. As discussed below, Blastp analysis using Mmc3 sequences as queries exclusively returned full length hits to other Mmc3 proteins. However, BLAST searching using BdMmc3, SvMmc3, and SfpMmc3 as queries returned a small number of low quality partial hits to Cpf1 (Evalue >1e-6) sequences at a central portion of Mmc3 (AAs ˜650-850). This portion encompasses the RuvC I region and is approximately 150 amino acids N-terminal to the RuvC I motif. In Cpf1, this region includes the WED domain that is responsible for nucleotide-specific interactions with the 5′ handle of the crRNA (Yamano et al. 2016). Many of the residues in this region that directly interact with the crRNA are highly conserved among Cpf1 effectors. Given that Mmc3 likely utilizes a crRNA with a 5′-handle sequence (corresponding to the sequence at the 3′ end of the CRISPR repeat (see FIG. 3A) similar to Cpf1, sequence conservation in the WED domain might be anticipated. To examine this possibility, a multiple alignment of all Mmc3 effectors was assessed for conservation of key conserved residues in the Cpf1 WED domain. Overall, alignment of Mmc3 sequences to the Cpf1 WED domain was of poor quality. Where alignment was of sufficient quality to facilitate comparison, there was no finding of conservation of WED domain residues implicated in direct crRNA interaction. These results indicate that the low quality, partial alignments to Cpf1 for a subset of Mmc3 effectors was not predictive of conservation of the WED domain. Further, although Mmc3 utilizes a similar crRNA repeat sequence as Cpf1 (see Example 3), the mechanism by which the crRNA interacts with the effector is likely different due to the different domain structure/protein fold. Finally, Yamano et al. identified a second nuclease domain in AsCpf1 referred to as the nuc domain This second nuclease domain has so far only been reported for Cpf1, so is a defining feature of that family No support for alignment of the Cpf1 nuc domain to Mmc3 was obtained using methods similar to those described for RuvC and the WED domain.

### Zinc Finger Domain

[0163] During manual inspection of an alignment of Mmc3 sequences, it was noticed that there are four conserved cysteine residues near the C-terminus of Mmc3 between the RuvC II and III domains (FIG. 6). The conserved cysteines form two pairs, the first of which includes two cysteine residues separated by 2 intervening residues and the second of which is separated by 2-5 intervening residues. There are between 11 and 48 residues between the second cysteine of the first pair and the first cysteine of the second pair. For example, BdMmc3 has the cysteines of the first pair at amino acid positions 1171 and 1174 and the cysteines of the second pair at amino acid positions 1188 and 1193; NoMmc3 has the cysteines of the first pair at amino acid positions 1123 and 1126 and the cysteines of the second pair at amino acid positions 1138 and 1142; SfMmc3 has the cysteines of the first pair at amino acid positions 1205 and 1208 and the cysteines of the second pair at amino acid positions 1249 and 1252; and SvMmc3 has the cysteines of the first pair at amino acid positions 1178 and 1181 and the cysteines of the second pair at amino acid positions 1230 and 1233. The grouping of two pairs of cysteines is characteristic of zinc finger protein structural motif. The cysteine pairs of zinc finger domains coordinate metal ions, usually zinc, and are often involved in binding to DNA, RNA, or other molecules. Hidden Markov model searches of the Mmc3 zinc finger region show that it is most similar to zinc finger domains in the Zinc Beta Ribbon clan but does not exactly match any pfam in the clan. Several Class 2 CRISPR-Cas effectors have zinc finger domains located between the RuvC II and III domains near the C-terminus (Shmakov et al. (2017) Nat Rev Microbiol. 15: 169-182). Type V effectors C2c3, CasX, and CasY all have zinc finger domains whereas C2c1, Cpf1, and Type II effector Cas9 are characterized by Shmakov et al. (2017, ibid) as having lost or inactivated their zinc finger domains.

### Evolutionary Relationship to Other TypeV Systems

[0164] Mmc3 protein sequences were aligned with reference sequences for other known Type V CRISPR systems, namely, Cpf1, C2c1, CasY, CasX, and C2c3. Cpf1 reference sequences were taken from Zetsche et al. (2015), as these sequences were considered representative of Cpf1 sequence diversity across the family, and these are the only Cpf1s to date that have been functionally characterized. Reference C2c1 and C2c3 sequences were taken from Shmakov et al. 2015, and the CasX and CasY sequences were taken from Burstein et al. 2017 Nature 542: 237-541. All subsequent phylogenetic analyses were performed using Geneious R10 software (Geneious.com). Multiple sequence alignments were constructed using MUSCLE with default settings and up to 10 iterations (Edgar et al. 2004 Nucl Acids Res., 32: 1792-1797). Alignments were used in conjunction with PHYML (atgc-montpellier.fr/phyml/) to construct a phylogenetic tree based on a maximum-likelihood model with 100 pseudo-replicates. High-support was recovered for Mmc3 representing a distinct mono-phyletic clade within Type V CRISPR systems, as indicated by the bootstrap analysis showing 100% of all pseudo-replicates supporting the Mmc3 clade (see FIGS. 7 and 8).

[0165] The relationship between Cpf1 and Mmc3 was investigated further by performing an All-by-All Blast of the effector protein sequences. For this, BLAST+ v.2.2.31 was used to generate a BLAST protein database for Cpf1, Mmc3, C2c1, C2c3, CasX, and CasY. The FASTA file used to make the database was then aligned against itself, returning in all possible alignments. The e-values from the alignments were used to make a network file, in which each protein was a node, and the lowest e-value for each query-subject pair were the edges. As each protein also served as a query sequence, nodes typically have two edges between them. This network was visualized in Cytoscape 3.4.0., using a circular layout and the “bundle edges” function for readability. Using a threshold of 1e-15 all Mmc3 effectors cluster as a unique group amongst other Type V systems. Raising this threshold to 1e-14 maintains Mmc3 as a distinct group, but results in an edge between C2c3 and CasY systems, which are established in the literature as distinct CRISPR subtypes (Burstein et al. 2017). A threshold of 1e-11 is required to disrupt Mmc3 clustering, but at this threshold numerous edges are now present between C2c3 and CasY. Together, this analysis supports the claim the Mmc3 is distinct effector and a new sub-type of TypeV CRISPR systems.

### Blastp Analysis of Mmc3 Against NCBI NR Database

[0166] Each Mmc3 effector protein sequence was used as a query against the NCBI non-redundant database using the Blastp algorithm with default settings. Overall, the top hits to Mmc3 queries were other Mmc3 polypeptides, as defined by prior phylogenetic and Blastp network analyses. Several Mmc3 queries returned hits to Cpf1 annotated proteins, but these hits were only to a small fraction of the Mmc3 query sequence, and typically had high expectation of occurring by chance with E-value >0.01. These results support the claim that Mmc3 is evolutionarily distinct relative to known Type V effector families.

[0167] Table 7 summarizes the findings, showing hits returning E-values >0.01 ranked by % query coverage.

TABLE 7
Mmc3 queries against the NCBI nr database

| Query | Accession | % ID | Query Coverage | E-value | Description |
|---|---|---|---|---|---|
| NoMmc3 | KIE18642.1 | 32% | 94% | 1.E−111 | Smp3Mmc3 |
| SEQ ID NO: 6 | KFO67988.1 | 33% | 91% | 4.E−108 | SmpMmc3 |
| | OGX23684.1 | 30% | 89% | 2.E−75 | ObpMmc3 |
| | KKQ38176.1 | 29% | 83% | 7.E−67 | CrpMmc3 |
| SfMmc3 | KIM12007.1 | 35% | 98% | 0.E+00 | SfpMmc3 |
| SEQ ID NO: 2 | KIE18642.1 | 24% | 58% | 1.E−17 | Smp3Mmc3 |
| | OGX23684.1 | 23% | 58% | 9.E−12 | ObpMmc3 |
| | KKQ38176.1 | 20% | 57% | 3.E−08 | CrpMmc3 |
| | KFO67988.1 | 23% | 52% | 1.E−12 | SmpMmc3 |
| BdMmc3 | KIM12007.1 | 43% | 99% | 0.E+00 | SfpMmc3 |
| SEQ ID NO: 1 | KKQ38176.1 | 22% | 58% | 6.E−09 | CrpMmc3 |
| | OGX23684.1 | 24% | 32% | 1.E−04 | ObpMmc3 |
| | OGW03971.1 | 25% | 18% | 8.E−04 | Cpf1 |
| SvMmc3 | KIM12007.1 | 35% | 98% | 0.E+00 | SfpMmc3 |
| SEQ ID NO: 3 | OGX23684.1 | 23% | 61% | 6.E−11 | ObpMmc3 |
| | KIE18642.1 | 24% | 58% | 3.E−13 | Smp3Mmc3 |
| | KKQ38176.1 | 22% | 50% | 5.E−13 | CrpMmc3 |
| | WP_016301126.1 | 26% | 19% | 0.005 | Cpf1 |
| | WP_009217842.1 | 26% | 18% | 8.E−04 | Cpf1 |
| | SER03894.1 | 26% | 18% | 0.002 | Cpf1 |
| | WP_006283774.1 | 26% | 16% | 0.002 | Cpf1 |
| NapMmc3 | KIE18642.1 | 37% | 99% | 0.E+00 | Smp3Mmc3 |
| SEQ ID NO: 4 | KFO67988.1 | 36% | 99% | 4.E−179 | SmpMmc3 |
| | KKQ38176.1 | 31% | 99% | 2.E−116 | CrpMmc3 |
| | OGX23684.1 | 30% | 99% | 6.E−119 | ObpMmc3 |
| ShMmc3 | KIE18642.1 | 33% | 92% | 6.E−113 | SmpMmc3 |
| SEQ ID NO: 5 | KFO67988.1 | 34% | 89% | 2.E−116 | Smp3Mmc3 |
| | KKQ38176.1 | 27% | 74% | 3.E−67 | CrpMmc3 |
| | OGX23684.1 | 30% | 73% | 1.E−91 | ObpMmc3 |
| SmpMmc3 | KIE18642.1 | 80% | 99% | 0.E+00 | Smp3Mmc3 |
| SEQ ID NO: 11 | OGX23684.1 | 32% | 99% | 1.E−157 | ObpMmc3 |
| | KKQ38176.1 | 29% | 99% | 4.E−113 | CrpMmc3 |
| CrpMmc3 | OGX23684.1 | 31% | 98% | 1.E−123 | ObpMmc3 |
| SEQ ID NO: 13 | KIE18642.1 | 29% | 98% | 1.E−115 | Smp3Mmc3 |
| | KFO67988.1 | 29% | 98% | 9.E−113 | SmpMmc3 |
| | KIM12007.1 | 22% | 65% | 4.E−08 | SfpMmc3 |
| ObpMmc3 | KFO67988.1 | 32% | 98% | 6.E−159 | SmpMmc3 |
| SEQ ID NO: 14 | KIE18642.1 | 32% | 98% | 2.E−154 | Smp3Mmc3 |
| | KKQ38176.1 | 31% | 97% | 5.E−125 | CrpMmc3 |
| | KIM12007.1 | 23% | 69% | 5.E−10 | SfpMmc3 |
| | WP_015940869.1 | 35% | 6% | 0.008 | transposase |
| SfpMmc3 | OGX23684.1 | 22% | 61% | 2.E−08 | ObpMmc3 |
| SEQ ID NO: 15 | KKQ38176.1 | 22% | 56% | 5.E−08 | CrpMmc3 |
| | WP_066040075.1 | 25% | 28% | 3.E−05 | Cpf1 |
| | KIE18642.1 | 24% | 25% | 5.E−04 | Smp3Mmc3 |
| | OGW03971.1 | 26% | 21% | 1.E−06 | Cpf1 |
| | WP_006283774.1 | 24% | 20% | 2.E−04 | Cpf1 |
| | SER03894.1 | 24% | 20% | 2.E−04 | Cpf1 |
| | KFO67988.1 | 25% | 17% | 4.E−04 | SmpMmc3 |
| | WP_065256572.1 | 29% | 16% | 8.E−05 | Cpf1 |
| | WP_036388671.1 | 29% | 16% | 1.E−04 | Cpf1 |
| | WP_049895985.1 | 29% | 16% | 2.E−04 | Cpf1 |
| | WP_062499108.1 | 28% | 16% | 1.E−04 | Cpf1 |
| | WP_024988992.1 | 28% | 15% | 0.006 | Cpf1 |
| | WP_016301126.1 | 26% | 15% | 9.E−04 | Cpf1 |

[0168] A BLAST search using NoMmc3 as query recovered four hits. The four hits are Mmc3 proteins: SmpMmc3, Smp3Mmc3, ObpMmc3 and CrpMmc3 (Table 7). A BLAST search using SfMmc3 as query resulted in five hits of high significance (E-value <1e-8) which are Mmc3 proteins: SfpMmc3, Smp3Mmc3, SmpMmc3, ObpMmc3, and CrpMmc3 (Table 7); two hits were obtained having low significance (E-value >0.01) and these two hits are annotated Cpf1 sequences: OGD68774.1, OGF20863.1. Both hits are to the RuvC domain and account for only 15% of the Mmc3 Query sequence. Based on full length alignments both hits are ˜11% ID to SfMmc3.

[0169] Using BdMmc3 as the query, three hits were recovered having high significance (E-value <1e-4), which were all Mmc3 proteins: SfpMmc3, CrpMmc3 and ObpMmc3. SfpMmc3 was the only hit spanning the entire length of query BdMmc3. A single hit with E-value 8e-4 was obtained to annotated Cpf1 protein OGW03971, however, this hit was based on only 18% query coverage. OG03971 shares only 12% amino acid identity to BdMmc3 when aligned over the full length of the protein. Four hits of low significance (E-value >0.01) were to Cpf1 annotated proteins with query coverage of ˜16%. In addition, there were several transposase domain proteins (Tn orfB) proteins which showed a small region of similarity with the BdMmc3 RuvC domain (E-value >0.01).

[0170] Using SvMmc3 as a query, four Mmc3 proteins: SfpMmc3, CrpMmc3, ObpMmc3 and SfpMmc3, were recovered having E-value <1e-5. Of these, only SfpMmc3 aligned to SvMmc3 along its entire length. Four hits having E-value <0.01 & >1e-5 to Cpf1 annotated proteins were recovered. One of the recovered proteins, WP_009217842.1 showed 18% query coverage and E-value=8e-04. Another protein recovered in this Blast search was SER03894.1, showing 16% query coverage & E-value=0.002. Thirteen proteins were recovered as hits of low significance (E-value >0.01) and were identified as Cpf1 annotated proteins, with query coverage of 11% -17%.

[0171] BLAST-search recovery results with NapMmc3 as a query Resulted in four hits with of high significance (E-value <1e-116) that were all Mmc3 proteins: SfpMmc3, Smp3Mmc3, CrpMmc3, and ObpMmc3. Five hits with E-values >0.01 were orfB family transposases.

[0172] A BLAST-search using ShMmc3 as a query retrieved the sequences of Smp3Mmc3, SmpMmc3, ObpMmc3, CrpMmc3 as top hits (E-value <1e-67).

[0173] BLAST-search recovery results with SmpMmc3 as a query resulted in hits of high significance (E <1e-113) that were Mmc3 proteins SfpMmc3, Smp3Mmc3, CrpMmc3, and ObpMmc3. Several low quality hits were recovered to orfB family transposases (E-value >0.01).

[0174] BLAST analysis results with CrpMmc3 as a query retrieved four hits with E-value <1 e-8 that were all Mmc3 proteins: SfpMmc3, SmpMmc3, Smp3Mmc3, and ObpMmc3.

[0175] BLAST results using ObpMmc3 as a query showed recovery of significant hits to SfpMmc3, SmpMmc3, Smp3Mmc3, and CrpMmc3 (E-value <1e-10). Several low quality hits were recovered to proteins with transposase E-value >0.01.

[0176] BLAST results using SfpMmc3 as a query with highest significance were CrpMmc3 and ObpMmc3 (Evalue <1e-6). Smp3Mmc3 and SmpMmc3 (E >1e-6) and 17-25% query coverage were also recovered. Several hits were recovered to Cpf1 proteins (E-value >1e-6), showing about 12-28% query coverage. Cpf1 hits spanned the RuvC I sub-domain and the WED domain Cpf1-annotated protein OGW0397.1 was again recovered in this search, having 21% query coverage and E-value=1e-6. Cpf1-annotated protein WP_066040075.1 was also recovered, having 28% query coverage & E-value=3e-5. In both cases, alignment of the full-length proteins showed ˜12% identity to SfpMmc3.

[0177] Based on the results provided above, we conclude that the polypeptides designated as Mmc3 do not share substantial sequence similarity with any other protein class or effector proteins other than with themselves. The few results which identified a Cpf1 family member were typically derived from low quality alignments (E-value >0.01) covering a small region of the query sequence (<20%). Cpf1 hits aligned to the RuvC domain and/or the WED domain, which might be expected based on the conservation of the RuvC domain across all Type V systems and the putative role of the WED domain in interacting with the crRNA 5′ handle. However, when examined across the entire set of Cpf1 and Mmc3 reference sequences, the RuvC and WED domains show substantial differences in conservation of key residues that reinforces the lack of broader sequence homology, demonstrating that Mmc3 and Cpf1 are different protein families

### Example 2

### Depletion Libraries and PAM Analysis

[0178] The protospacer adjacent motif (PAM) is a typically 2-6 base pair DNA sequence immediately proximal to the DNA sequence targeted by the nuclease (protospacer). Depending on the CRISPR system, a PAM sequence can be positioned either 5′ or 3′ relative to the protospacer sequence. Type V CRISPR-Cas systems show a specificity towards 5′ PAM sequences that are T-rich. In contrast, Cas9, a Type II Cas, has specificity for a 3′ G-rich PAM sequence. Plasmid depletion studies were performed as means to demonstrate activity of Mmc3 systems and determine their PAM sequence requirement. The general workflow for these experiments is given in FIGS. 9 and 10. Briefly, cells expressing the effector and either a targeting CRISPR array (‘CRarray A’ in FIG. 9) or a non-targeting CRISPR array (control, ‘CRarray B’ in FIG. 9) are made competent for further transformation with the target (protospacer-containing) plasmid. Cells of each type (targeting ‘CRarray A’-containing and non-targeting ‘CRarray B’-containing) are then transformed with a plasmid library that includes all combinations of a 5′-6N PAM sequence (i.e., a 5′-6N PAM library) juxtaposed with the protospacer that matches the spacer in the targeting CRISPR array (‘Target A+6N-PAM’ in FIG. 9). For testing of Mmc3 effectors, a 5′ PAM library was used as all Type V systems described to date require a 5′ PAM sequence. In this scheme, systems showing RNA-guided DNA interference will cleave the subset of plasmids with the correct protospacer and PAM sequence, thereby depleting these plasmids from the transformed population. For the non-targeting CRISPR array control, cleavage of the target plasmid should not occur, regardless of the PAM sequence on the plasmid, so no selective depletion of any PAM sequence in the transformed population is expected. After recovery of transformants and deep sequencing of target plasmids, the frequency of each of the PAM sequences found in the transformants is compared between targeting and non-targeting experiments. Identification of PAM sequence motifs depleted in the targeted population relative to the non-targeted population indicates these PAM sequences promoted successful RNA-guided DNA-interference (cleavage and removal of the plasmid), allowing inference of the system's PAM preference.

[0179] FIG. 11 provides diagrams of plasmid constructs used to test programmable DNA cleavage of Mmc3 systems and determine PAM preferences. As shown in FIG. 11, the test system outlined in FIG. 9 has three genetic components: 1) a synthesized effector gene cloned into a low copy vector under the control of an inducible Ptet promoter, 2) a synthetic minimal CRISPR array encoding a non-natural spacer sequence (‘Spacer 1’ (SEQ ID NO:82) positioned between CR repeats, and 3) a target plasmid with the specific protospacer (‘Spacer 1’, SEQ ID NO:82) and either a 5′ 6N-PAM library or a specific 5′-PAM sequence. FIG. 9 shows the schematics of a depletion assay based on these plasmids for quantifying targeted DNA cleavage activity of CRISPR/Cas and determining PAM preferences using a 6N PAM library, and FIG. 10 shows a flowchart of the overall process. Testing each Mmc3 member for its PAM specificity is accomplished by assessing the ability of a nuclease to cleave a library of plasmids containing a protospacer flanked by a random 6-mer PAM sequence. In this system, plasmids having PAM sequences that support effector nuclease activity are cleaved and thereby depleted from the resulting transformed population because the the host carrying a plasmid with the functional PAM is not viable—thus the function of the PAM is confirmed by its depletion from the transformed population. PAM libraries can be synthesized, and a a panel of 6-mers representing the various permutations of each of the four nucleotide residues at each position of the PAM can be juxtaposed to a synthesized target (protospacer) sequence in a construct that is transformed into the test cells to determine the specificity and nuclease activity for each Mmc3 family member.

[0180] To identify the PAM sequence used by Mmc3 effectors, a synthetic spacer sequence (‘Spacer 1’, SEQ ID NO:82) that would serve as the target sequence for cleavage was cloned into a pUC-based plasmid backbone that included a colE1 origin of replication and a beta-lactamase gene conferring resistance to beta lactam antibiotics. A N6 PAM library was constructed by inserting a random 6-mer immediately 5′ of the spacer sequence. To do this, an inverse PCR reaction was performed using a forward primer than binds to Spacer1 and a reverse primer that binds upstream of Spacer1on the reverse strand. The reverse primer included six random bases at the 5′ end followed by Spacer1sequence. The resultant product was covalently closed using Gibson Assembly and cloned into E. coli. A diverse number of resultant clones (>100,000 CFU) were recovered and used to prepare plasmid DNA.

[0181] Preparation of CRISPR-array and Mmc3 transformed bacteria for testing the functionality of PAM sequences was as follows: EPI-300 electrocompetent bacteria were transformed with the effector plasmid and the CRISPRarray plasmid combinations to be tested. Co-transformants were selected on LB plates supplemented with 12.5 μg/mL chloramphenicol (Cm12.5) to select for the effector expression plasmid plus 50 μg/uL spectinomycoin (Sp50) to select for the CRISPR array plasmid and incubated overnight at 37° C. On the following day, 3 mL LB+Cm12.5 plus Sp50 was inoculated with independent clones for each effector/CRISPR pairing. On the third day, overnight cultures were diluted (1:100) into 60 mL LB+Cm12.5+Sp50 +anhydrotetracycline 100 ng/mL (aTc100) (which induces expression of the effector) in a 250 mL flask and incubated at 37° C. while shaking 220 rpm until the optical density of the bacterial culture (OD₆₀₀) was between 0.4 and 0.6. When cultures reached the required OD, they were placed on ice to cool. Then, the culture was transferred to a 50 mL pre-chilled Falcon tube and centrifuged at 5000×g for 5-7 minutes. The resulting bacterial pellet wass washed in an equal volume of cold sterile distilled water and centrifuged at 5000×g for 5-7 minutes Finally, the pellet was washed in 1.5 mL of 10% ice cold sterile glycerol, pelleted and resuspended in 200 μL of 10% glycerol. Cells were then divided into 50 uL aliquots for use.

[0182] The plasmid depletion assay was performed on the same day that the competent cells were prepared. For controls with specific PAM sequences 50 uL of competent cells were transformed with 5 ng of plasmid. For N6 libraries, 50 uL of competent cells were transformed with 50 ng of plasmid, which equates to >1×10⁸ plasmids. Transformation was performed by electroporation using 0.1 cm cuvettes and under standard Biorad electroporator settings for bacteria (1.8 kV, 200Ω, 25 μF). The transformants were recovered with 700 μL of SOC media supplemented with aTc100 and incubated with shaking at 37° C. for 1 hour.

[0183] Recovery of N6-PAM library transformants: 30 mL of LB supplemented with Cm12.5+Sp50+Carbenicillum 100 μg/mL (Cb100)+aTc100 media in (125-250 mL) flasks were inoculated with 300 μL of transformed bacteria and incubated overnight with shaking at 37° C. Transformation titers were obtained by a serial dilution covering 10⁰-10⁵ in a microtiter plate and plating in replicate on an LB+Cb100 and/or LB+Cm12.5+Sp50 +Cb100+aTc100 plate. Plates were dried and incubated at 37° C. overnight.

TABLE 8
Control strains for Plasmid Depletion Assays

| | | Spacer in | |
|---|---|---|---|
| Strain | Effector | crRNA | Notes |
| AGE60 | Cas9 | Spacer 1 | Positive control for cleavage with known |
| | Streptococcus pyogenes | SEQ ID | Cas9 effector |
| | (SEQ ID NO: 80) | NO: 82 | |
| AGE39 | Cas9 | Spacer 2 | Negative control for cleavage with known |
| | Streptococcus pyogenes | SEQ ID | Cas9 effector, non-targeting RNA |
| | (SEQ ID NO: 80) | NO: 83 | |
| AGE153 | Cpf1 | Spacer 1 | Positive control for cleavage with known |
| | Acidaminococcus sp. | SEQ ID | Cpf1 effector |
| | (SEQ ID NO: 81) | NO: 82 | |
| AGE152 | Cpf1 | Spacer 2 | Negative control for cleavage with known |
| | Acidaminococcus sp. | SEQ ID | Cpf1 effector, non-targeting RNA |
| | (SEQ ID NO: 81) | NO: 83 | |

TABLE 9
PAM library and reporter plasmids

| | | Spacer in | |
|---|---|---|---|
| Strain | Reporter Plasmid | crRNA | Notes |
| AGE v37 | 3′-AGG-Spacer_1 | Spacer 1 | Cas9 3′ PAM |
| | reporter plasmid | SEQ ID NO: 82 | positive control |
| AGE v38 | 3′ N6-Spacer_1 | Spacer 1 | 3′ PAM Test library |
| | library | SEQ ID NO: 82 | |
| AGE v83 | 5′ TTTC-Spacer_1 | Spacer 1 | 5′ PAM Mmc3 |
| | reporter plasmid | SEQ ID NO: 82 | positive control |
| AGE v82 | 5′ TTTC-Spacer_2 | Spacer 2 | 5′ Mmc3 PAM, |
| | reporter plasmid | SEQ ID NO: 83 | incorrect target |
| AGE v76 | 5′ N6-Spacer_1 | Spacer 1 | 5′ PAM Test library |
| | library | SEQ ID NO: 82 | |

[0184] FIGS. 12A-D show PAM depletion signal results for several Mmc3 polypeptides. FIG. 12A shows PAM enrichment scores represented as SeqLogos for the Mmc3 family member SvMmc3 (SEQ ID NO:3). A 5′ TTN sequence is indicated as preferred for SvMmc3 cleavage and is consistent across both biological and technical replicates. FIG. 12B shows PAM enrichment scores represented as SeqLogos for the Mmc3 family member SfMmc3 (SEQ ID NO:2). A 5′ TTN sequence is indicated as preferred for SfMmc3 as well and is consistent across both biological and technical replicates. FIG. 12C shows PAM enrichment scores represented as SeqLogos for the Mmc3 family member NoMmc3 (SEQ ID NO:6). A 5′ CTN sequence is indicated as preferred for NoMmc3 activity and is consistent across both biological and technical replicates. FIG. 12D shows PAM enrichment scores represented as SeqLogos for BdMmc3 (SEQ ID NO:1). A 5′ CTN or 5′ TTN sequence is indicated as preferred for BdMmc3 depending on biological replicate. Results are consistent between technical replicates. In general, BdMmc3 (SEQ ID NO:1), SfMmc3 (SEQ ID NO:2) and NoMmc3 (SEQ ID NO:6) show enrichment for PAM motifs in addition to the top enriched motif suggesting the potential for more relaxed PAM requirements than SvMmc3 (SEQ ID NO:3), which has a more dominant signature for the 5′ TTN PAM enrichment.

### Example 3

### Plasmid Interference Assays to Test Genome Editing

[0185] Capabilities of Mmc3 Effectors

[0186] FIG. 13 depicts an assay for quantifying targeted DNA cleavage activity of CRISPR/Cas systems using target plasmids that encode specific 5′-PAM sequences flanking a compatible protospacer sequence. PAM sequences that support cleavage at the protospacer yield reduced numbers of transformants relative to controls that included a non-compatible spacer sequence in the CRISPR array (CRarray) plasmid or an incorrect PAM sequence in the target construct. This assay was performed essentially the same way as the plasmid depletion assay described in Example 2, with the exception that a PAM library plasmid was not used. Instead, as depicted schematically in FIG. 13, the system was used to test in vivo activity of a given Mmc3 effector, where plasmid depletion resulting from effector activity (cleavage of the target plasmid) was measured against a control where either an incorrect PAM or a PAM whose effectiveness was being tested was used in the target plasmid.

[0187] FIG. 14 illustrates the results of testing different PAM sequences when expressing BdMmc3 (SEQ ID NO:1), NoMmc3 (SEQ ID NO:6), SfMmc3 (SEQ ID NO:2), and SvMmc3 (SEQ ID NO:3) effectors using this assay system. PAM dependence of DNA interference activities for the Mmc3 systems was assessed by comparing transformation frequencies of target plasmids encoding the following 5′-PAM sequences flanking the targeted protospacer (Sp1, SEQ ID NO:82): 1) 5′-TTTT 2) 5′-ATTC 3) 5′-ACTC 4) 5′-TATC 5) 5′-TCTC 6) 5′-GTTC 7) 5′ TTTC 8) 5′ GGGG. In addition, a non-targeted protospacer (Sp2) control was performed, where the Sp2 sequence (SEQ ID NO:83) provided in the CRISPR array plasmid did not match (did not have homology to) the target sequence in the target plasmid. Relative reduction in transformation frequency compared to non-target control using a particular PAM sequence in the target plasmid indicates activity of the system for RNA-guided DNA interference using the PAM. From this analysis, BdMmc3 and NoMmc3 and SfMmc3 activity profile is consistent with a 5′-HTN PAM, where H is A, C, or T/U, whereas SfMmc3 activity profile us consistent with a 5′-TTV PAM, where V is A, C, or G. Results were largely consistent with PAM depletion analysis (see, FIGS. 12A-D), but provide finer resolution on the accepted PAM sequences for each system. For instance, SvMmc3 does not accept a ‘T’ at the first position in the PAM, whereas it was not possible to discern this from the library depletion analysis (FIG. 12A). Furthermore, SfMmc3, NoMmc3 and BdMmc3 can accept a ‘C’ at the third position in the PAM with similar efficiency to ‘T’. On examination of the depletion data it can be seen that ‘C’ and ‘T’ are enriched in the seqLogos to similar degrees for all three systems, consistent with the analysis presented (FIG. 14). In general, these analyses confirm that Mmc3 effectors have a more relaxed PAM requirement than reported for AsCpf1 and LbCpf1, which are reported to be 5′-TTTV (Kim et al. (2016) Nature Methods, 14: 153-159). A more relaxed PAM sequence is an advantage as it provides more flexible targeting options across a genome.

[0188] Mmc3 systems were assessed for DNA-interference activity by comparing transformation frequencies with plasmids encoding either a protospacer sequence that matched the spacer encoded by the crRNA or a non-specific protospacer sequence. The general scheme for these assays is also shown in FIG. 13. The AsCpf1 effector (SEQ ID NO:81) was also included to compare performance to another Type V CRISPR system. FIG. 15 shows target specific DNA interference activities of the Mmc3 systems relative to AsCpf1: BdMmc3 (SEQ ID NO:1), NoMmc3 (SEQ ID NO:6), SfMmc3 (SEQ ID NO:2), SvMmc3 (SEQ ID NO:3), and AsCpf1 (SEQ ID NO:81). The designation “Correct Target” indicates plasmids which encode a protospacer that matches the crRNA spacer sequence (Sp1, SEQ ID NO:82), whereas the “Incorrect Target” plasmid encode a protospacer that is mismatched with the crRNA spacer sequence (Sp2, SEQ ID NO:83). The relative reduction in transformation frequency between “Correct” and “Incorrect” target experiments indicates activity of the system for RNA-guided DNA interference. Both target plasmids encode the 5′ TTTC PAM sequence shown to support activity of Mmc3 systems and AsCpf1. From this analysis, all Mmc3 systems show 3-4 log reduction on transformation frequency for the correct target relative to the incorrect target. BdMmc3 and SfMmc3 are more active for DNA cutting in the E. coli bioassay relative to AsCpf1.

[0189] The same plasmid interference assays were also performed using NapMmc3 (SEQ ID NO:4), ShMmc3 (SEQ ID NO:5), PcMmc3 (SEQ ID NO:7), SmpMmc3 (SEQ ID NO:11), Smp2Mmc3 (SEQ ID NO:12), CrpMmc3 (SEQ ID NO:13), ObpMmc3 (SEQ ID NO:14), and SfpMmc3 (SEQ ID NO:15) effectors. Activity was observed for ShMmc3, PcMmc3, Smp2Mmc3, ObpMmc3, and SfpMmc3 utilizing Spacer 1 (Sp1) and a 5′-TTTC PAM (FIGS. 16A and 16B). As can be seen in FIGS. 15, 16A and 16B, the number of colonies resulting when the correct target sequence and PAM was used in the target plasmid dropped by at least 90% relative to controls, and by greater than three orders of magnitude for several effectors (e.g., ShMmc3, PcMmc3, SfpMmc3). The percent editing based on this plasmid interference assay for Mmc3 effectors was thus found to be at least about 90% and up to 99.9%. The activity of the ShMmc3, PcMmc3, Smp2Mmc3, and SfpMmc3 effectors compared favorably with that of known Cpf1 effector AsCpf1.

### Example 4

### Determination and Validation of Mmc3 Processed crRNA

[0190] RNA sequencing (“RNAseq”) was used to experimentally determine the sequence of processed crRNA guides for four Mmc3 systems: SfMmc3, SvMmc3, NoMmc3 and BdMmc3. Small RNA (sRNA) was purified from E. coil strains transformed with vectors expressing a particular Mmc3 effector and vectors expressing a corresponding CRISPR array having a designed spacer sequence (Sp1, SEQ ID NO:82) flanked by CRISPR repeats. As shown in FIG. 3A, the CRISPR repeat sequences of the various Mmc3 arrays are very similar to one another (consensus sequence SEQ ID NO:27), with the 3′-most 18 nucleotides of the repeats being almost identical (consensus sequence SEQ ID NO:44). Small RNA (sRNA) was prepared using the mirVana miRNA isolation kit (ThermoFisher, cat#AM1560) as described by the manufacturer. Libraries were constructed using the NEBnext small RNA library prep set (New England Biolabs) and sequenced using an Illumina MiSeq platform. After QC, trimmed reads were aligned to the Mmc3 CRISPR region and analyzed for crRNA processing.

[0191] FIGS. 17A-D show diagramatically the results of the RNAseq, with reads mapped against the constructs for expressing the crRNAs. Co-expression of the crRNA and either the SfMmc3 (SEQ ID NO:2) or SvMmc effector (SEQ ID NO:3) resulted in processing of the crRNA to contain 18 bp of the CRISPR repeat sequence (SEQ ID NO:45 for SfMmc3 and SEQ ID NO:47 for SvMmc3) followed by 18-25 bp of the spacer sequence 3′ to the CRISPR repeat. The processed NoMmc3 crRNA showed a similar structure to the SfMmc3 repeat but had a 19 bp CRISPR repeat sequence (SEQ ID NO:46). Although the 3′ processing of the BdMmc3 crRNAs could not be resolved, it was empirically found that guide RNAs (crRNAs) having 18-19 nucleotides of the 3′ end of the repeat sequence juxtaposed with an 18-23 nucleotide target (spacer) sequence which was positioned 3′ of the 18-19 nucleotide repeat sequence were effective for genome editing regardless of whether the crRNA also included repeat sequences 3′ of the spacer (target) sequence.

[0192] Based on the RNAseq results, processed forms of crRNA were tested by modifying the construct that encoded the crRNA used for the E. coli plasmid interference assays. FIG. 17E shows constructs that were tested for expressing crRNAs in E. coli that expressed either the BdMmc3 (SEQ ID NO:1) or NoMmc3 (SEQ ID NO:6) effector. In the “CR-Sp-CR” construct (SEQ ID NO:86), a full CRISPR repeat (SEQ ID NO:28 for BdMmc3 and SEQ ID NO:33 for NoMmc3) was positioned downstream of the PJ23119 promoter (SEQ ID NO:84), followed by the Spacer 1 sequence (Sp1, SEQ ID NO:82), which was followed by another full CRISPR repeat (SEQ ID NO:28 for BdMmc3 or SEQ ID NO:33 for NoMmc3). A terminator sequence (SEQ ID NO:85) was positioned downstream of the second CRISPR repeat. The *CR-Sp-CR* construct (SEQ ID NO:87) had the same promoter-CRISPR repeat-Spacer-CRISPR repeat-terminator organization, but the CRISPR repeats were either an 18 nt repeat (for BdMmc3, SEQ ID NO:45) or 19 nt repeat (for NoMmc3, SEQ ID NO:46) instead of the full 36 or 37 nucleotides of the native repeat. The CRISPR repeat was followed by the Spacer 1 sequence ((Sp1, SEQ ID NO:82) and a partial CRISPR repeat consisting of the first 16 bp, followed directly by a terminator sequence (SEQ ID NO:85). The *CR-Sp* construct (SEQ ID NO:88) had a single processed form of the CRISPR repeat (SEQ ID NO:45 or SEQ ID NO:46) followed by a shortened 23 nt spacer sequence (SEQ ID NO:89) which was followed directly by a terminator sequence, that is, *CR-Sp* had the sequence of a processed guide inserted between the promoter and terminator of the construct.

[0193] As shown in FIGS. 17F and 17G, both NoMmc3 and BdMmc3, the minimal crRNA construct comprising the processed crRNA encoding sequence operably linked to the PJ23119 promoter (SEQ ID NO:84) supported equivalent activity to the un-processed CRISPR array plasmid (SEQ ID NO:86). These data support the predictions from the RNAseq data and define the processed crRNA as comprising an 18-19 bp RNA derived from the 3′ end of the CRISPR repeat that is upstream of RNA derived from the 5′ end of the spacer that need be no greater than 23 bp.

[0194] Additionally, the longer processed form (*CR-Sp-CR*), suggested by the BdMmc3 RNAseq, supported activity similar to that of the minimal construct described above. Based on these data, no additional functionality or relevance is ascribed to the longer processed form of the crRNA predicted from BdMmc3 RNAseq data.

### Example 5

### Multiplex Targeting with an Mmc3 System

[0195] E. coli strains expressing a CRISPR array with two full repeat regions and an Mmc3 effector were observed to generate two processed crRNAs, one for each repeat (FIG. 18A). The first processed crRNA included the engineered spacer sequence (Sp1, SEQ ID NO:82) immediately 3′ to 18 bp of repeat sequence. The second processed crRNA, as determined by RNAseq, had a spacer sequence (Sp3; SEQ ID NO:90) derived from the terminator that followed the second repeat (see FIG. 18A). This was observed in all systems analyzed, for example, in the BdMmc3, NoMmc3, SfMmc3, and SvMmc3 systems. The ability of these effectors to process two different crRNAs from a single CRISPR array construct suggested the potential for targeting two protospacer sequences simultaneously using a single CRISPR array construct.

[0196] To test this hypothesis, a reporter plasmid was built with a spacer sequence compatible with the predicted terminator spacer sequence (Sp3, SEQ ID NO:90) and flanked by a 5′-TTTC PAM. Strains containing the full-length synthetic CRISPR array (repeat-spacer-repeat-terminator) were capable of targeting reporters containing either the Sp1 spacer (SEQ ID NO:82) or the terminator-derived spacer (Sp3, SEQ ID NO:90), as demonstrated in a plasmid interference assay. FIG. 18B provides the results of plasmid interference assays where the target plasmid included either the Sp1 or Sp3 spacer, where the number of colonies resulting from transformations that included a double spacer crRNA construct for targeting Sp1 (SEQ ID NO:82) and Sp3 (SEQ ID NO:90) were two to three orders of magnitude lower than colonies resulting from transformation with a reporter plasmid encoding non-targeting spacer Sp2 (SEQ ID NO:83). These results support applications of Mmc3 for multiplexed editing, as a single array was able to support multiple on-target DNA cleavage reactions.

### Example 6

### Genome Editing in E. coli with Mmc3

[0197] Mmc3 was tested for its ability to target a chromosomal locus in E. coli and facilitate repair-dependent editing. The genome target chosen was rpoB, the essential gene encoding RNA polymerase. Mmc3 effectors BdMmc3 (SEQ ID NO:1) and NoMmc3 (SEQ ID NO:6) were tested for their ability to target the rpoB locus using different crRNAs that included a 19 nt processed repeat sequence (5′-AATTTCTACTATTGTAGAT, SEQ ID NO:46) and different spacer sequences: Mmc3_rpoB_sp1 (SEQ ID NO:92), Mmc3_rpoB_sp2 (SEQ ID NO:93), and Mmc3_rpoB_sp4 (SEQ ID NO:94) (FIG. 19). S. pyogenes Cas9, a known Type II effector (“SpCas9”, SEQ ID NO:80) and Acidaminococcus sp. Cpf1, a known Type V effector (“AsCpf1”, SEQ ID NO:81) were assayed for comparison, where the AsCpf1 effector was tested using the Mmc3 guides, as the processed repeat sequences in Cpf1 editing systems differ from that of the Mmc3 processed repeat sequence by only a single nucleotide, and the Cas9 effector was tested using the Cas9-rpoB-Sp1 guide (SEQ ID NO:96, having guide (spacer) sequence SEQ ID NO:95) and Cas9-rpoB-sp2 guide (SEQ ID NO:98, having guide (spacer) sequence SEQ ID NO:97). E. coli does not possess NHEJ activity, therefore double-strand breaks in the chromosome cannot be repaired in the absence of a template for homology-dependent repair. The result of successful targeting by the Mmc3 effectors is therefore lack of viability.

[0198] Targeting of the chromosome instead of a plasmid therefore used a modified protocol since combining a plasmid for expressing an effector and a plasmid for expressing a CRISPR array (or crRNA) that targets the chromosome results in nonviable cells. Strains expressing the Mmc3 effector were transformed with target or non-target crRNA (control) plasmids followed by selection for maintenance of the crRNA plasmid. Because maintenance of a crRNA plasmid that supports chromosome cleavage would be lethal, the effective transformation rate is reduced when the effector and crRNA support chromosome cleavage relative to combinations of the effector and crRNA that do not support chromosomal cleavage.

[0199] When tested in the manner outlined above, the effectors showed varied amounts of chromosome cleavage depending on the crRNA utilized (FIG. 20A-D). The BdMmc3 (SEQ ID NO:1) (FIG. 20A) and NoMmc3 (SEQ ID NO:6) (FIG. 20B) effectors demonstrated activity that was as good, if not better, than that of the Cas9 effector (SEQ ID NO:80) (FIG. 20D) for at least one crRNA (Mmc3_rpoB_sp2 (SEQ ID NO:100), >3 log reduction in transformants). Control effector AsCpf1 (SEQ ID NO:81) showed poor cleavage for all guides tested (FIG. 20C). While robust activity for both NoMmc3 and BdMmc3 was observed with the rpoB-Sp2 guide RNA (SEQ ID NO:100), the rpoB-Sp4 guide RNA (SEQ ID NO:101) showed robust cleavage for BdMmc3 only. The rpoB-Sp2 protospacer in the E. coli genome utilized a Mmc3-specific TCTC PAM providing independent support for the relaxed PAM requirements of Mmc3 effectors (see FIG. 14).

[0200] A number of point mutations in rpoB confer resistance to rifampicin, providing positive selection for mutant alleles. This allowed for testing Mmc3 effectors for the ability to facilitate mutation of the rpoB locus by homologous recombination with a repair or donor template. Introduction of the rpoB allele conferring rifampicin resistance (rifR) was achieved by cloning the repair template into the crRNA plasmid (FIG. 21A). The repair template (SEQ ID NO:102) included the D516V mutation with approximately 800 bp of rpoB gene homologous sequence on either side of the mutated site that confers rifampicin resistance. In addition, four synonymous mutations were introduced downstream of the D516V mutation to ablate the target site and prevent re-cleavage once the repair fragment had been integrated into the cleaved target site (FIG. 21A). To confirm the specificity of Mmc3-dependent rpoB cleavage, the same synonymous mutations from the repair template were introduced into the rpoB_sp2 crRNA plasmid as a control to confirm that the repair template was not recognized by the Mmc3 effectors. This ‘REPAIR’ guide sequence did not support chromosomal cleavage by BdMmc3 and NoMmc3 (FIG. 21B).

[0201] The protocol for testing CRISPR-assisted editing of the rpoB locus for rifR was as follows: E. coli NEB 10-beta was transformed with a rpoB crRNA plasmid that also included the repair template (SEQ ID NO:102). These strains were then transformed with either 1) the appropriate effector expression plasmid or 2) an empty vector control plasmid. Transformants were selected for on 1) LB+Cm to assess transformation frequency, 2) LB+Cm+Rif to assess the frequency of RifR (repair of rpoB locus) for transformed cells, 3) LB+Rif to assess population-wide rate of RifR, and 4) LB only to measure the number of viable cells. Calculation of the apparent frequency of RifR per transformed cell reports on the efficacy of CRISPR-assisted editing:

[0202] For experiments with crRNA+Repair & CRISPR effector

[0203] % editing=No. RifR-CmR transformants/No. CmR transformants*100%

[0204] For experiments with crRNA+Repair & no CRISPR effector

[0205] % recombination=No. RifR/No. viable cells*100%

[0206] For experiments with non-targeting crRNA (no Repair) & no CRISPR effector

[0207] % Spontaneous=No. RifR/No. viable cells*100%

[0208] Using the above method, the efficacy of CRISPR-assisted editing for RifR was measured for BdMmc3 and SpCas9 (Table 10). Based on this analysis the BdMmc3 effector increased the apparent frequency of RifR between 3-4 orders of magnitude over the rate of recombination in the absence of BdMmc3 and approximately 6 orders of magnitude greater than the rate of spontaneous RIfR (FIG. 22). For the Cas9 effector expressed in a host that included a plasmid having a crArray encoding a Cas9-rpoB-sp2 guide in the donor plasmid, the frequency of RifR/transformed cells was below the limit of detection, preventing quantification of editing efficacy. As transformation frequencies for Cas9 and BdMmc3 effector plasmids were similar, BdMmc3 demonstrated greater efficacy for genome editing than SpCas9 in this system.

TABLE 10
CRISPR-mediated genome editing rates

| System | Variable | Rep1 | Rep2 |
|---|---|---|---|
| BdMmc3 | Effector (+) | 0.4% | 2.3% |
| | Effector (−) | 0.00013% | 0.000561% |
| | Fold-enrichment | 3019 | 4167 |
| Cas9 | Effector (+) | N/A | N/A |
| | Effector (−) | 0.00024% | 0.000125% |
| | Fold-enrichment | N/A | N/A |

[0209] Sequencing of several RifR clones confirmed the presence of the D165V mutation and the synonymous mutations present in the repair template (FIG. 23). The wild type sequence was confirmed in RifR clones that did not have the repair template. Together these data support the conclusion that BdMmc3 was highly effective at mediating gene editing and repair with a template that allowed introduction of a D516V RifR allele and ablation of the BdMmc3 cleavage site.

### Example 7

### Mutation of Predicted RuvC Catalytic Residues and Zinc Finger Domain

[0210] The RuvC-like domains of Mmc3 effectors contain the catalytic residues predicted to be responsible for the nuclease activity. To confirm these predictions, three mutants of BdMmc3 were constructed to replace each predicted catalytic residue with alanine. Mutants D841A, E1061A and N1217A were tested for nuclease activity using the standard plasmid interference assay in E. coli (see Example 2). Mutations D841A and E1061A completely abolished DNA cleavage, whereas mutation of the RuvC III domain (N1217A) did not affect DNA cleavage activity relative to the wild type effector control (FIG. 24). (Mutation of the RuvC III catalytic domain in Cpf1 also had little effect on DNA cleavage activity.) Together, these results support the bioinformatic analysis of the RuvC catalytic residues of Mmc3 effectors and confirms the identified RuvC II motif (FIGS. 5A and 5B) which was found to be uniquely positioned within the Mmc3 protein relative to its position in effectors of other known TypeV systems (Example 1).

[0211] Mmc3 systems having effectors that included mutations designed to disable the nuclease function while retaining sequence-specific DNA binding (referred to herein as dMmc3 systems) were also tested in E. coli for their ability to bind dsDNA and thereby inhibit transcription of genes. The test system was composed of three parts: 1) a mutated Mmc3 effector gene cloned into a vector (pACYC) under control of an inducible P_{Tet} promoter; 2) a synthetic CRISPR array encoding two to three non-natural spacers expressed from a constitutive promoter on a medium copy number vector (pCDF, Kim, J. S. and Raines, R. T. (1993) Protein Science 2: 348-356) and 3) lacI and lacZ genes encoded in the chromosome of E. coli MG1655 strain (Table 11). When co-expressed in the same cell, specific association of the Mmc3 effector with a cognate crRNA directs the effector to bind double-stranded (ds) DNA at sequences containing a sequence complementary to the spacer sequence of the crRNA (the target site), where the target sequence occurs downstream of a TTTV motif (the PAM for the Mmc3 effectors). The binding of the dMmc3 effector to target sites within the lacI and lacZ genes blocks transcription of these genes. The inhibition of transcription of either LacI or LacZ can be measured by a photometric assay using ortho-Nitrophenyl-β-galactoside (ONPG) as the substrate for the LacZ enzyme. Repression of the lacI gene by dMmc3 can be measured by detecting an increase in β-galactosidase activity as a product of LacZ expression, while repression of the lacZ gene by dMmc3 can be measured by detecting a decrease in β-galactosidase activity in the presence of IPTG when compared to strains expressing a non-targeting crRNA (FIG. 25).

[0212] Using this system, DNA binding in vivo by the Mmc3 effector dBdMmc3 was tested and compared to transcriptional repression mediated by dAsCpf1. Effector genes were synthesized to encode effectors having a mutation that changes the aspartate at residue number 908 of AsCpf1 and at residue number 841 of BdMmc3 (within the RuvC I domain, FIG. 5) to alanine. The resulting mutant effectors are referred to as dAsCpf1 and dBdMmc3, respectively. The mutated effector genes were synthesized by PCR using primers that incorporated the mutated codons and cloned into the pACYC vector under the control of the P_{TET} promoter that is induced by the addition of tetracycline to the culture medium.

[0213] Assays to demonstrate binding of the dAsCpf1 and dBdMmc3 effectors to sites in the lacI and lacZ genes were performed by transforming E. coli strain MG1655 that included the lacI and lacZ genes integrated into the chromosome with a construct that included a gene encoding a mutant effector (dAsCpf1 or dBdMmc3) and a construct that encoded a crRNA array, where the crRNA included multiple units of cognate CRISPR repeat and spacer sequence. Two to three crRNA units were encoded in each array as set forth in Table 11.

TABLE 11
Lac I and LacZ Target Sequences

| CRarray / Target name | Target sequence |
|---|---|
| LacI_array_target 1 | CTCGAGTGCAAAACCTTTCGCGGTATGG |
| | (SEQ ID NO: 201) |
| LacI_array_target 2 | GCGGTATGGCATGATAGCGCCCGGAAGA |
| | (SEQ ID NO: 202) |
| LacI_array_target 3 | AATAGGCGTCGAGGCCTTTGCTCGAGTG |
| | (SEQ ID NO: 203) |
| LacZ_array A_Target 1 | CAACGTCGTGACTGGGAAAACCCTGGCG |
| | (SEQ ID NO: 204) |
| LacZ_array A_Target 2 | GCCAGCTGGCGTAATAGCGAAGAGGCCC |
| | (SEQ ID NO: 205) |
| LacZ_array A_Target 3 | ATGTTGATGAAAGCTGGCTACAGGAAGG |
| | (SEQ ID NO: 206) |
| LacZ_array B_Target 1 | CAACGTCGTGACTGGGAAAACCCTGGCG |
| | (SEQ ID NO: 207) |
| LacZ_array B_Target 2 | CTGTGTGAAATTGTTATCCGCTCACAAT |
| | (SEQ ID NO: 208) |

[0214] Freshly prepared competent cells (25 uL) of E. coli MG1655 were electroporated with 50 ng of a plasmid for expression of the mutant effector that included a chloramphenicol resistance gene and 50 ng of a plasmid for expression of the cognate crRNA as a control. Each of the dAsCpf1 and dBdMmc3 effectors was separately co-transformed with a construct having a spectinomycin resistance gene and encoding a cognate crRNA that included either a guide sequence targeting LacZ, a guide sequence targeting LacI, or a non-targeting guide sequence as a control. Electroporation was performed using 1 mM cuvettes and the standard Biorad electroporator settings for bacteria (1.8 kV, 200 mW, 25μF) Immediately after electroporation cells were re-suspended in 900 uL of SOC medium and incubated at 37° C. for 1 h. Transformations were plated on LB plates containing chloramphenicol (12.5 μg/mL) and spectinomycin (50 μg/mL). Plates were incubated overnight at 37° C. and colonies were in 5.0 mL of LB medium containing chloramphenicol (12.5 μg/mL) and spectinomycin (50 μg/mL) and incubated at 37° C. overnight. The next morning 25 μL of the overnight cultures were transferred to 2.5 mL of LB chloramphenicol (12.5 μg/mL), spectinomycin (50 μg/mL) and anhydrotetracycline (100 ng/mL) containing IPTG concentrations of 0 to 1 mM of IPTG and incubated at 37° C. until the cultures reached OD600 of 0.4-0.6. Cultures were normalized to a final OD600 of 0.8 and centrifuged at 5000×g for 5 min at 4° C. Supernatants were removed and pellets were resuspended in 1.0 mL of Lysis buffer (100 mM Tris/HCl, pH 7, 100 mM KCl, 10 mM MgCl₂, 35 mM DTT, 1 mg/mL lysozyme, 2.0 U/mL benzonase (Sigma E1014-25KU), 0.10% Triton X-100, 1 mg/mL ONPG (Sigma N1127). Plates were centrifuged at 5000×g for 5 min at 4° C. and supernatants were transferred to 96 well plates. Absorbance of supernatants were measured at 420 nm for quantification of relative expression of β-galactosidase activity. Microplate-reader β-galactosidase assays in E. coli were adapted from Schaefer et al. (2016) Analytical Biochemistry 503:56-57.

[0215] FIGS. 26A-D show the RNA-guided and DNA-interference activity for dAsCpf1 (D908A) and dBdMmc3 (D841A) when co-expressed with crRNAs targeting LacI and LacZ genes in E. coli as indicated by the reduction in absorbance at 420 nm from the cleaved β-galactosidase substrate. dAsCpf1 showed 9-fold repression of LacZ when tested with CRarray A that included three target sequences (FIG. 26A), while 0.4-fold repression was observed for dBdMmc3 using a CRarray against the same targets (FIG. 26B). For the Lad gene, dAsCpf1 showed 12-fold repression (FIG. 26A) while no repression was detected by dBdMmc3 (FIG. 26B). Additional targets within the LacZ gene were further tested with dBdMmc3 and showed that target B can yield up to 6.5-fold repression of LacZ (FIG. 26D), demonstrating that an Mmc3 effector mutated in a critical nuclease domain is able to bind the target site and affect transcription when the target site is within or upstream of a gene.

[0216] The functional significance of the zinc finger domain that is located between RuvC II and RuvC III motifs was also examined using the plasmid interference assay. The cysteine pairs of the NoMmc3 and SfMmc3 effectors were mutated to alanine as pairs and all together. For NoMmc3, the first cysteine pair mutations were C1123A and C1126A and the second cysteine pair mutations were C1138A and C1142A. The NoMmc3 having all four cysteines (both pairs) mutated had all of the C1123A, C1126A, C1138A, and C1142A mutations. For SfMmc3, C1205 and C1208 of the first cysteine pair and, independently, C1249 and C1252 of the second cysteine pair were mutated to alanine, and in an additional mutant, both SfMmc3 cysteine pairs (all four cysteine residues: C1205, C1208, C1249, and C1252) were mutated to alanine. FIG. 27 shows that the alanine mutations at either cysteine pair of the zinc finger domain completely abolish effector cleavage activity, highlighting the significance of this domain in Mmc3 effectors.

### Example 8

### Mmc3 Activity in Fungal Cells

[0217] Mmc3 effectors were tested for their ability to cleave a nuclear localized plasmid in two yeast hosts, Saccharomyces cerevisiae and Kluyveromyces marxianus. The assays were designed such that cleavage of target plasmids in these hosts resulted in loss of the plasmids from the cell and an inability to grow in the absence of histidine due to loss of the linked his3 marker (FIG. 28).

[0218] In independent assays, a gene encoding the BdMmc3 effector codon-optimized for Saccharomyces cerevisiae (SEQ ID NO:103) and a gene encoding the NoMmc3 effector codon-optimized for S. cerevisiae (SEQ ID NO:104), as well as a S. cerevisiae codon-optimized gene encoding a SpCas9 effector (SEQ ID NO:105) and a S. cerevisiae codon-optimized gene encoding zn AsCpf1 (SEQ ID NO:106), were expressed constitutively from an extrachromosomal plasmid carrying a ura3 marker. The codon optimized Cas9, AsCpf1, BdMmc3 and NoMmc3 effector genes were constitutively expressed using the S. cerevisiae FBA1 promoter (SEQ ID NO:107). The AsCpf1, BdMmc3 and NoMmc3 effectors each carried a c-myc NLS and an SV40 NLS in tandem and followed by a peptide linker and 8× His tag (SEQ ID NO:108). The SpCas9 polypeptide included a C-terminal SV40 NLS (encoded by SEQ ID NO:109). The effector, targeting, and selection plasmids carried CEN/ARS sequences for propagation as single-copy plasmids in both S. cerevisiae and K. marxianus.

[0219] The target plasmid carrying the his3 marker was maintained in the strains together with the effector plasmids that constitutively expressed the effector proteins by growing cells in defined media lacking uracil and histidine. The yeast strains were made electrocompetent and transformed with three separate guide RNAs (gRNAs), each targeting a separate sequence of the OriT sequence of the plasmid (see Table 12). For each effector tested, a control transformation was carried out with a non-targeting gRNA (SEQ ID NO:110) in place of an actual target sequence. A selection plasmid carrying the trp1 marker was co-transformed alongside the gRNAs to select for transformed cells. The procedure for electroporation was essentially the same as described in Kannan et. al. (2016) Sci. Rep. 6, 30714; doi: 10.1038/srep30714.

[0220] During each transformation, 2 μg of the in vitro transcribed gRNAs (Table 11) and 200 ng of the selection plasmid were included. After electroporation using parameters 2.5 kV, 200Ω, 25 μF, cells were recovered overnight at 30° C. in 2 ml of non-selective recovery media (1:1 ratio of YPAD:1M Sorbitol). 100 μl of the recovered cells were plated on agar plates lacking uracil and tryptophan (selecting for the effector plasmid and cells that were transformed with the trp1 selection plasmid co-transformed with the gRNA) and incubated overnight at 30° C. Twenty-four to twenty-five colonies from each plate were patched onto agar plates lacking uracil and histidine and incubated overnight at 30° C. The number of colonies that did not produce growth when patched on plates lacking uracil and histidine (indicating the presence of the effector plasmid and the target plasmid, respectively) were recorded.

TABLE 12
Guide RNAs for DNA Editing

| | SEQ ID | |
|---|---|---|
| Guide RNA | NO | Description |
| Control Guide RNA used to test | 110 | Guide includes random target sequence, |
| Bd, No, Sh, Sf, Smp2 Mmc3 effectors | | does not target test nucleic acid molecule |
| Bd_OriT_T1 crRNA, used to test Bd, | 111 | 18 nt repeat followed by T1 spacer |
| No, Sh, Sf, & Smp2 Mmc3 effectors | | |
| Bd_OriT_T2 crRNA, used to testBd, | 112 | 18 nt repeat followed by T2 spacer |
| No, Sh, Sf, & Smp2 Mmc3 effectors | | |
| Bd_OriT_T3 crRNA, used to test Bd, | 113 | 18 nt repeat followed by T3 spacer |
| No, Sh, Sf, & Smp2 Mmc3 effectors | | |
| Control Guide RNA used to test | 114 | Guide includes random target sequence, |
| SfpMmc3 effector | | does not target test nucleic acid molecule |
| Sfp_OriT_T1 crRNA, used to test | 115 | 18 nt repeat followed by T1 spacer |
| Sfp Mmc3 effector | | |
| Sfp_OriT_T2 crRNA, used to test | 116 | 18 nt repeat followed by T2 spacer |
| SfpMmc3 effector | | |
| Sfp_OriT_T3 crRNA, used to test | 117 | 18 nt repeat followed by T3 spacer |
| SfpMmc3 effector | | |
| Control Guide RNA used to test | 118 | Guide includes random target sequence, |
| AsCpf1 effector | | does not target test nucleic acid molecule |
| AsCpf1_OriT_T1 crRNA | 119 | 20 nt repeat followed by T1 spacer |
| AsCpf1_OriT_T2 crRNA | 120 | 20 nt repeat followed by T2 spacer |
| AsCpf1_OriT_T3 crRNA | 121 | 20 nt repeat followed by T3 spacer |
| Control Guide RNA used to test | 122 | Guide includes random target sequence, |
| Cas9 effector | | does not target test nucleic acid molecule |
| Cas9_OriT_T1 guide RNA | 123 | Cas9 chimeric guide with T1 guide |
| | | sequence |
| Cas9_OriT_T2 guide RNA | 124 | Cas9 chimeric guide with T2 guide |
| | | sequence |
| Cas9_OriT_T3 guide RNA | 125 | Cas9 chimeric guide with T3 guide |
| | | sequence |

[0221] Initially, the Cas9, AsCpf1, BdMmc3, and NoMmc3 effectors were tested in K. marxianus, with three on-target gRNAs and one random non-targeting gRNA (‘Neg. Control’ in FIG. 29) tested for each effector strain (see Table 12). Plasmid depletion above background was observed with at least one of the three on-target guides for each of the Cas9, AsCpf1 and NoMmc3 expressing strains. The BdMmc3-expressing strain showed plasmid depletion above background for all three on-target guides (FIG. 29, Tables 13 and 14).

[0222] In this assay system, background plasmid depletion is defined by the frequency of plasmid loss that occurs in the absence of CRISPR mediated cleavage. For K. marxianus this level is approximately 50% of clones. There are two ways to normalized for this background: 1) assume background is not independent of active depletion of the plasmid and subtract the background from the experimental measurement and divide by the number of colonies screened, or 2) assume background is independent from active depletion of the plasmid—subtract the background from the experimental measurement and divide by the number of colonies screened adjusted for the expected frequency of non-specific plasmid loss. Method 1 gives a more conservative estimate than method 2. The editing percentages for BdMmc3 using normalization method 1 were for target 1, 32%; for target 2, 40%; and for target 3, 48%. The editing percentages for BdMmc3 using normalization method 2 were target 1, 67%; target 2, 83%; and target 3, 100% (Tables 13 and 14).

[0223] This initial experiment was replicated with BdMmc3 alone and yielded similar results: plasmid depletion indicated effector activity was well above background for all three target guides (Tables 15 and 16).

[0224] Cas9 and BdMmc3 effectors were also assessed in S. cerevisiae for their ability to cure the nuclear plasmid in a similar manner to that described for K. marxianus. The rate of plasmid loss with the randomized (Neg. Control) guide RNA was much lower for S. cerevisiae suggesting that the target plasmid is intrinsically more stable in S. cerevisiae. Both Cas9 and BdMmc3 expressing strains demonstrated plasmid depletion above background for all three on-target guides. The efficiency of plasmid cleavage and depletion was high for all three guides. The editing percentages for BdMmc3 using normalization method 1 were target 1, 84%; target 2, 84%; and target 3, 84%. The editing percentages for BdMmc3 using normalization method 2 were target 1, 100%; target 2, 100%; and target 3, 100% (Tables 17 and 18). The editing percentages for Cas9 using normalization method 1: target 1, 76%; target 2, 72%; and target 3, 72%. Editing percentages for Cas9 using normalization method 2 were target 1, 95%; target 2, 89%; and target 3, 89% (Tables 16 and 17).

[0225] The initial experiment in S. cerevisiae was replicated with BdMcm3 and Cas9, as well as with additional CRISPR effectors NoMmc3 and AsCpf1. BdMmc3 and Cas9 again showed high activity, with all cells examined depleted for the target plasmid. The editing percentages for BdMmc3 using normalization method 1 were target 1, 72%; target 2, 72%; and target 3, 72%. The editing percentages for BdMmc3 using normalization method 2 were target 1, 100%; target 2, 100%; and target 3, 100% (Tables 19 and 20). The editing percentages for Cas9 using normalization method 1: target 1, 76%; target 2, 76%; and target 3, 76%. Editing percentages for Cas9 using normalization method 2 were target 1, 100%; target 2, 100%; and target 3, 100% (Tables 19 and 20).

[0226] Additional codon-optimized Mmc3 CRISPR effector genes SfMmc3 (SEQ ID NO:126), ShMmc3 (SEQ ID NO:127), Smp2Mmc3 (SEQ ID NO:128), and SfpMmc3 (SEQ ID NO:129) were also tested in S. cerevisiae for editing capacity. These experiments utilized crRNAs with 18 nucleotide (nt) and 19 nt processed repeat sequences followed by a target sequence 3′ of the repeat sequence. Table 12 provides the SEQ ID NOs of guides having 18 nt repeat sequences. Guides that were tested for the SfMmc3, ShMmc3, SmpMmc3, and Smp2Mmc3 effector systems (SEQ ID NOs:110-113) that had an 18 nt “processed” repeat sequence had the processed repeat sequence of SEQ ID NO:45, and guides for the SfpMmc3 system that was tested (SEQ ID NOs:114-118) that had an 18 nt “processed” repeat sequence had the processed repeat sequence of SEQ ID NO:47. Guides having 19 nt repeat sequences had one additional nucleotide of the native repeat sequence at the 5′ end. For the SfMmc3, ShMmc3, SmpMmc3, and Smp2Mmc3 effector systems that were tested, the 19 nt guide RNAs included an additional ‘A’ at the 5′ end of the repeat sequence (SEQ ID NO:46). The 19 nt guide RNAs of the SfpMmc3 effector system that was tested also included an additional ‘A’ at the 5′ end of the repeat sequence (SEQ ID NO:48). Plasmid depletion above background was observed for Smp2Mmc3, SfMmc3 and SfpMmc3 effectors for at least one of the three on-target guides across experiments using 18 nt and 19 nt processed repeat sequences (Tables 21-24). In general, 19 nt repeat sequences resulted in a higher percentage of editing than 18 nt repeat sequences.

[0227] For experiments using an 18 nt processed repeat sequence, the editing percentages for SfMmc3 using normalization method 1 were target 1, 0%; target 2, 12%; and target 3, 16%. The editing percentages for SfMmc3 using normalization method 2 were target 1, 0%; target 2, 16%; and target 3, 21% (Tables 21 and 22). The editing percentages for SfpMmc3 normalization method 1 were target 1, 12%; target 2, 24%; and target 3, 8%. The editing percentages for SfpMmc3 using normalization method 2 were target 1, 16%; target 2, 32%; and target 3, 11% (Tables 20 and 21).

[0228] For experiments using a 19 nt processed repeat sequence, the editing percentages for SfMmc3 using normalization method 1 were target 1, 20%; target 2, 20%; and target 3, 0%. The editing percentages for SfMmc3 using normalization method 2 were target 1, 26%; target 2, 26%; and target 3, 0% (Tables 23 and 24). The editing percentages for SfpMmc3 normalization method 1 were target 1, 16%; target 2, 36%; and target 3, 32%. The editing percentages for SfpMmc3 using normalization method 2 were target 1, 21%; target 2, 47%; and target 3, 42% (Tables 23 and 24).

[0229] FIG. 30 shows a representative set of data for plasmid depletion experiments performed in S. cerevisiae.

TABLE 13
Normalized editing (%) for K. marxianus Rep1
(Assuming non-independence of experiment and control)

| Effector | Target 1 | Target 2 | Target 3 | Random |
|---|---|---|---|---|
| AsCpf1 | 0% | 0% | 28% | 0% |
| BdMmc3 | 32% | 40% | 48% | 0% |
| NoMmc3 | 16% | 0% | 0% | 0% |
| Cas9 | 0% | 0% | 48% | 0% |

TABLE 14
Normalized editing (%) for K. marxianus Rep1
(Assuming independence of experiment and control)

| Effector | Target 1 | Target 2 | Target 3 | Random |
|---|---|---|---|---|
| AsCpf1 | 0% | 0% | 58% | 0% |
| BdMmc3 | 67% | 83% | 100% | 0% |
| NoMmc3 | 40% | 0% | 0% | 0% |
| Cas9 | 0% | 0% | 100% | 0% |

TABLE 15
Normalized Editing (%) for K. marxianus Rep2
(Assuming non-independence of experiment and control)

| Effector | Target 1 | Target 2 | Target 3 | Random |
|---|---|---|---|---|
| BdMmc3 | 44% | 36% | 40% | 0% |

TABLE 16
Normalized Editing (%) for K. marxianus Rep2
(Assuming independence of experiment and control)

| Effector | Target 1 | Target 2 | Target 3 | Random |
|---|---|---|---|---|
| BdMmc3 | 65% | 53% | 59% | 0% |

TABLE 17
Normalized Editing (%) for S. cerevisiae Rep1
(Assuming non-independence of experiment and control)

| Effector | Target 1 | Target 2 | Target 3 | Random |
|---|---|---|---|---|
| BdMmc3 | 84% | 84% | 84% | 0% |
| Cas9 | 76% | 72% | 72% | 0% |

TABLE 18
Normalized Editing (%) for S. cerevisiae Rep1
(Assuming independence of experiment and control)

| Effector | Target 1 | Target 2 | Target 3 | Random |
|---|---|---|---|---|
| BdMmc3 | 100% | 100% | 100% | 0% |
| Cas9 | 95% | 89% | 89% | 0% |

TABLE 19
Normalized Editing (%) for S. cerevisiae Rep2
(Assuming non-independence of experiment and control)

| Effector | Target 1 | Target 2 | Target 3 | Random |
|---|---|---|---|---|
| AsCpf1 | 0% | 0% | 4% | 0% |
| BdMmc3 | 72% | 72% | 72% | 0% |
| NoMmc3 | 0% | 0% | 4% | 0% |
| Cas9 | 76% | 76% | 76% | 0% |

TABLE 20
Normalized Editing (%) for S. cerevisiae Rep2
(Assuming independence of experiment and control)

| Effector | Target 1 | Target 2 | Target 3 | Random |
|---|---|---|---|---|
| AsCpf1 | 0% | 0% | 5% | 0% |
| BdMmc3 | 100% | 100% | 100% | 0% |
| NoMmc3 | 0% | 0% | 5% | 0% |
| Cas9 | 100% | 100% | 100% | 0% |

TABLE 21
Normalized Editing (%) for S. cerevisiae Rep1 using 18 bp
processed repeat sequence (Assuming non-independence
of experiment and control)

| Effector | Target 1 | Target 2 | Target 3 | Random |
|---|---|---|---|---|
| Smp2Mmc3 | 0% | 0% | 0% | 0% |
| ShMmc3 | 0% | 0% | 0% | 0% |
| SfMmc3 | 0% | 12% | 16% | 0% |
| SfpMmc3 | 12% | 24% | 8% | 0% |

TABLE 22
Normalized Editing (%) for S. cerevisiae Rep1 using 18 bp
processed repeat sequence (Assuming independence of
experiment and control)

| Effector | Target 1 | Target 2 | Target 3 | Random |
|---|---|---|---|---|
| Smp2Mmc3 | 0% | 0% | 0% | 0% |
| ShMmc3 | 0% | 0% | 0% | 0% |
| SfMmc3 | 0% | 16% | 21% | 0% |
| SfpMmc3 | 16% | 32% | 11% | 0% |

TABLE 23
Normalized Editing (%) for S. cerevisiae Rep1 using 19 bp
processed repeat sequence (Assuming non-independence
of experiment and control)

| Effector | Target 1 | Target 2 | Target 3 | Random |
|---|---|---|---|---|
| Smp2Mmc3 | 24% | 0% | 0% | 0% |
| ShMmc3 | 0% | 0% | 4% | 0% |
| SfMmc3 | 20% | 20% | 0% | 0% |
| SfpMmc3 | 16% | 36% | 32% | 0% |

TABLE 24
Normalized Editing (%) for S. cerevisiae Rep1 using 19 bp
processed repeat sequence (Assuming non-independence
of experiment and control)

| Effector | Target 1 | Target 2 | Target 3 | Random |
|---|---|---|---|---|
| Smp2Mmc3 | 0% | 0% | 0% | 0% |
| ShMmc3 | 0% | 0% | 5% | 0% |
| SfMmc3 | 26% | 26% | 0% | 0% |
| SfpMmc3 | 21% | 47% | 42% | 0% |

### Example 9

### High Efficiency Mmc3 Chromosomal Editing in S. cerevisiae

[0230] To test the BdMmc3 effector for the ability to cleave and edit a chromosomal locus, the oriT region (SEQ ID NO:130) from plasmid pCC1BAC HIS3Km OriT was inserted into the chromosome of S. cerevisiae at the YAL044W-A locus. This oriT region was the same region targeted in plasmid depletion assays (Example 8) and allows use of the same validated crRNAs for chromosomal editing.

[0231] The codon-optimized BdMmc3 effector gene (SEQ ID NO:103) was expressed constitutively from an extrachromosomal plasmid that carried a ura3 marker, maintained by growth of the yeast cells in defined media lacking uracil. Strains were made electrocompetent and transformed with in vitro transcribed crRNAs targeting protospacers T1 (SEQ ID:131) & T3 (SEQ ID:132) in the OriT region (see Table 12) as well as a dsDNA repair fragment (SEQ ID:133) designed to introduce an approximately 250 bp deletion at the targeted locus by homologous recombination (FIG. 31A and 31B). For each effector tested, a control transformation was carried out with a non-targeting (non-cognate) crRNA. For all transformations, a plasmid carrying the trp1 marker was co-transformed with the in vitro transcribed crRNA and repair fragment to select for transformed cells. The procedure for electroporation was the same as described in Example 8, above, and Kannan et. al. (2016). During each transformation, 2 μg of the in vitro transcribed crRNA (Table 12), 200 ng of the selection plasmid and 10 pmoles of the dsDNA repair fragment were included. After electroporation, cells were recovered overnight at 30° C. in 2 ml of recovery media (1:1 ratio of YPAD:1M Sorbitol) prior to plating on selective media. After transformation, cells were allowed to recover overnight in non-selective media and then plated on agar plates with defined nutrients lacking uracil and tryptophan. Individual colonies were screened by PCR for the presence of the predicted deletion. Primers used were 1730 (SEQ ID:134) and 1731 (SEQ ID:135). The unedited wild type sequence gave a product of 487 bp, whereas the edited sequence gave a product of 243 bp.

[0232] As can be seen from FIG. 31C, BdMmc3 paired with T1 and T3 crRNA yielded 3 out of 96 clones with PCR products that were approximately 250 bp smaller than the wild type fragment, indicative of effector-mediated editing. Importantly, no editing was observed when the non-cognate guide was used, indicating that editing was not due to spontaneous homologous recombination of the donor at the OriT locus in the absence of BdMmc3-dependent cutting at T1 and T3 targets. Sequence analysis of the three positive clones and one negative clone gave the anticipated results with deletions observed between guide T1 and T3 for the three positive clones and no deletion present in the negative control (FIG. 31D).

[0233] The experiment above utilized in vitro synthesized guides to target the OriT region cloned onto the chromosome. In a second experiment, editing was repeated using a plasmid to express the crRNA in vivo. For this experiment, yeast cells constitutively expressing BdMmc3 were transformed with a repair fragment as described above as well as a multicopy His-marked plasmid (pKD1322) encoding a minimal crRNA array composed of an SNR52 promoter (SEQ ID NO:136), a BdMmc3 full CRISPR repeat (SEQ ID NO:28), a spacer sequence targeting the oriT-T3 protospacer (SEQ ID NO:132), a second BdMmc3 CRISPR repeat and a SUP4 terminator (SEQ ID:138) (FIG. 32A). Transformants were selected on uracil and his dropout media prior to screening by colony PCR for the presence of the deletion in the oriT region. This analysis showed that 18/22 clones that produced an amplicon in the diagnostic PCR gave a product size consistent with deletion at the T3 target site, giving an editing efficiency of 82% (FIG. 32B). Again, no edited clones were observed when a non-cognate crRNA was used to target BdMmc3, reinforcing that the rate of spontaneous homologous recombination in the presence of a repair fragment is not sufficient to account for the frequency of editing we observe with BdMmc3 when paired with the correct crRNA.

[0234] A third experiment was performed, following the same format as immediately above (the BdMmc3 effector expressed from an extrachromosomal plasmid and a minimal crRNA array targeting the oriT-T3 protospacer (SEQ ID NO:132) expressed from a different plasmid), except that a repair fragment was supplied that encoded an insertion of approximately 700 bp (SEQ ID NO:139) rather than a deletion (FIG. 33A). The repair fragment carried 40 bp homology arms. Colony PCR indicated correct insertion of approximately 700 bp fragment at the T3 locus for 4/19 amplified clones, giving a knock-in efficiency of 21% (FIG. 33B).

### Example 10

### Transfection of Mammalian K562 Cells with Mmc3 Constructs

[0235] Mmc3 effector genes were codon optimized for expression in mammalian cells and cloned into a vector under the control of the CMV promoter (SEQ ID NO:141) for constitutive expression. Codon optimized Mmc3 effector genes included the BdMmc3 effector gene (SEQ ID NO:143), NoMmc3 effector gene (SEQ ID NO:140), and the SfMmc3 effector gene (SEQ ID NO:145). Also included was a human codon-optimized gene encoding the AsCpf1 effector (SEQ ID NO:180) and a human codon-optimized gene encoding the Smp2Cpf1 effector (SEQ ID NO:142). The engineered Mmc3 genes and Cpf1 genes were designed as C-terminal translational fusions with GFP to allow monitoring of transfection and Mmc3 effector expression. The Mmc3 effector-encoding portion of the fusion gene was joined to the GFP-encoding portion of the fusion gene by a sequence encoding a self-cleaving 2a peptide (SEQ ID NO:147). The Mmc3 effector-encoding portion of the translational fusion gene also included sequences (SEQ ID NO:91) encoding an amino acid sequence that included a nucleoplasmin NLS from Xenopus, followed by a GS peptide linker and then a 3× HA tag (SEQ ID NO:148) immediately upstream of the 2a peptide and GFP encoding sequences.

[0236] For each plasmid carrying a GFP-Mmc3 effector gene, a two-spacer multiplexed crRNA cassette specific to the Mmc3 type was cloned into the MauBI site in the plasmid backbone (FIG. 34). The crRNA cassette included the Human U6 promoter (SEQ ID NO:149) followed by the Mmc3 or Cpf1 CRISPR repeat (e.g., SEQ ID NO:28 for BdMmc3, SEQ ID NO:33 for Smp2Cpf1, SEQ ID NO:40 for NoMmc3, SEQ ID NO:29 for SfMmc3), a spacer sequence targeting CD46_exon1 (CD46_540sp, (SEQ ID NO:150), another copy of the Mmc3 CRISPR repeat, and a second spacer sequence CD46_541sp (SEQ ID NO:151) targeting a second location on the CD46_exon1 (SEQ ID NO:152). The crRNA cassettes ended in a polyT tract for transcript termination (SEQ ID NO:153). The NoMmc3 crRNA expression cassette used in the plasmid carrying the Smp2Cpf1 effector gene (SEQ ID NO:142) is provided as SEQ ID NO:154; the BdMmc3 crRNA expression cassette used in the plasmid carrying the BdMmc3 effector gene is provided as SEQ ID NO:155; the Smp2Mmc3 crRNA expression cassette used in the plasmid carrying the NoMmc3 effector gene is provided as SEQ ID NO:156; and the SfMmc3 crRNA expression cassette used in the plasmid carrying the SfMmc3 effector gene is provided as SEQ ID NO:157. The AsCpf1 crRNA expression cassette used in the plasmid carrying the AsCpf1 effector gene is provided as SEQ ID NO:190.

[0237] CD46 is a cell surface marker that can be detected with fluorescently labeled antibodies (e.g., a monoclonal antibody (MEM-258, Thermo Fisher) labeled with APC (Life Technologies, A15711). Loss of this marker by mutation of the coding region and subsequent dilution of receptors expressed on the cell surface by growth can be detected by flow cytometry. FIG. 34 shows, on the right, an example of a scatter plot in which each dot represents a single cell quantitated by flow cytometry for fluorescence from CD46 antibody staining on the Y axis, and for GFP fluorescence on the X axis. The horizontal line within the graph marks the fluorescence threshold that captures greater than 99% of CD46 detected on the surface of non-transformed cells above background, and the vertical line within the graph marks the cutoff value for fluorescence above background for GFP. Dots in the lower right quadrant therefor represent cells demonstrating GFP expression (and, because the GFP gene transformed into the cells is a translational fusion with the Mmc3 effector gene, also expressing the Mmc3 effector) and having reduced CD46 staining with respect to nontransformed cells.

[0238] To transfect K562 cells with plasmids expressing an Mmc3 effector and multiplexed crRNA targeting CD46, K562 (ATCC CCL-243) cells were grown in RPMI 1640 Medium, GlutaMAX Supplement (LifeTech 61870127) plus 10% FBS (Clontech 631367) and passaged every other day. Passaging of cells was done by diluting the culture to 0.3×10⁶ cells per ml and then plating 13 ml in a T75 flask. At the time of splitting of the culture there was usually between 0.7 and 1.3×10⁶ cells per ml. (Cells were kept in culture for less than a month before a new vial was thawed). Cells were nucleofected at the time they would normally be split. Cells were nucleofected using SF Cell Line 96-well Nucleofector™ Kit (96 RCT) (Lonza V4SC-2096) following the 4D protocol: Cells were counted and centrifuged for 10 minutes at 90×g. The approximately 200,000 cells were then resuspended in 16.4 μl SF buffer with 3.6 μl supplement then 20 μl was aliquoted into sterile pipet tubes. Up to 2 μl of DNA (2-4 μg) was added and mixed gently before transferring to nucleocuvette strips. The cells were shocked with a 4-D Nucleofector™ Core Unit electroporator (Lonza, AAF-1002B) with attached 4-D Nucleofector™ X Unit (Lonza, AAF-1002B) using program FF-120 and allowed to rest 10 minutes at room temperature before adding 100 μl of media pre-warmed to 37° C. The cells were transferred to 24 μl plates containing 400 μl of warm media, and cultures were split two days later.

[0239] Analysis of Mammalian K562 Cells Transformed with Mmc3 Effectors and Guide RNAs

[0240] To prepare cells for flow cytometry, two to four days after transfection cells are spun down and resuspend in 50 μl FACs buffer and 2 μl CD46 Monoclonal Antibody (MEM-258), APC (Lifetech A15711) for detection of the CD46 cell surface marker. Cells are stained 20-30 min in PBS+2% FBS+0.2% sodium azide at 4° C., washed with 750 μl buffer and resuspended in 200-400 μl buffer for analysis.

[0241] Samples are analyzed on a ZE5 flow cytometer (BioRad). GFP is excited at 488 nm and emission spectra is detected with a 525/35 nm bandpass filter. CD46 antibody conjugated to allophycocyanin (APC) is excited at 640 nm and emission spectra is detected with a 670/30 bandpass filter. The flow rate is 1000-2000 events/second. Forward and side scatter signals are used to define and gate total cells. Greater than 20,000 events are recorded for each sample and analyzed using FlowJo software (flowjo.com/) for the presence of CD46 staining in GFP-expressing cells. Cultures in which loss of CD46 expression on the cell surface of GFP-expressing cells is observed by loss of APC fluorescence with respect to controls can be analyzed by sequencing of the CD46 locus for indels associated with disruption of the CD46 gene (see FIG. 34).

[0242] For genomic DNA analysis, an aliquot of cells is spun down, the media removed, and the cells are lysed in QuickExtract™ DNA Extraction Solution (Epicentre QE09050) at about 20,000 cells/μl solution at 65° C. for 6 minutes followed by 98° C. for 2 minutes. One μl of extract is used as template in a PCR reaction to amplify the edited region of genomic DNA using PrimeSTAR® GXL DNA Polymerase (Clontech R050A). The 50 μl reaction contains 5 μl of 5× buffer, 4 μl dNTP, 1 μl template, 2 μl of polymerase, and 3 μl of each 5 μM forward primer (CD46-F1, SEQ ID NO:159) and reverse primer (CD46-R1, SEQ ID NO:160). Cycling conditions are 2 minutes at 94° C., 30 cycles of 10 seconds at 98° C., 15 seconds at 60° C., 30 seconds at 68° C. PCR product can be purified using DNA Clean & Concentrator kit (Zymo D4004). The final product can be sequenced by Illumina MiSeq and analyzed for insertions and deletions (INDELS) indicative of genome editing at the CD46 locus.

### Example 11

### RNAseq Analysis of crRNA Processing in Mammalian Cells

[0243] Processing of crRNA was demonstrated by RNAseq analysis of K562 cells expressing an Mmc3 effector-GFP translational fusion gene and a two-repeat multiplexed crRNA array as described in Example 10.

[0244] For this assay, 200,000 K562 cells were transfected by nucelofection with 2 μg of the plasmid containing the Mmc3 human codon-optimized gene expressed from the CMV promoter (SEQ ID NO:145) and a two-repeat multiplexed crRNA array described in Example 10. Approximately 800,000 cells were harvested two days after transfection. Small RNA (sRNA) was prepared using the mirVana miRNA Isolation kit (ThermoFisher, cat# AM1560) using methods described by the manufacturer. Enriched sRNA was prepared as a cDNA library using the CATS Small RNASeq kit (Diagenode, cat #C05010044). Based on the protocol from the manufacturer, approximately 7 ng of RNA was used for library construction with 15 amplification cycles. Libraries were sequenced on an Illumina MiSeq sequencing machine.

[0245] For analysis, single-end 75 nt-long reads were pre-processed using cutadapt (Martin (2-011) EMBnet.journal Vol. 17, No.1, pp. 10-12; DOI:10.14806/ej.17.1.200). 5′ ends were hard-trimmed by 3 nucleotides (nt), while 3′ ends were adaptively trimmed upstream a poly(A) sequence. This step also removes the Illumina sequencing adapter, since it is placed downstream the poly(A) sequence in Diagenode CATS libraries. Reads shorter than 17 nt after trimming were discarded. Reads were mapped to the human genome primary assembly hg38, supplemented with the crRNA sequence. Alignment was performed using STAR (Dobin et al 2013), with ENCODE parameters for small RNA-seq (protect-us.mimecast.com/s/lTncCJ6EVwU2LKyCVg9MC7?domain=encodeproject.org) Alignments were filtered to retain reads aligned to the crRNA scaffold using samtools. Mappings were visualized using IGV (Broad Institute) or Geneious.

[0246] Based on RNAseq performed in bacteria, processed forms were predicted to each include an 18-19 nt sequence derived from the 3′ end of the CRISPR repeat, followed by 20-25 nt derived from the 5′ end of the spacer. Sequences conforming to these specifications were observed for NoMmc3 and SfMmc3 (FIG. 35), confirming that Mmc3 effectors are able to process their own crRNAs and can do this in the context of a mammalian cell.

### Example 12

### Chromosomal Editing in Mammalian HEK293T Cells

[0247] The following protocol was used to transfect HEK293T cells with plasmids expressing an Mmc3 effector and a multiplexed crRNA array targeting CD46 as disclosed in Example 10. Lenti-X™ 293 T Cells (Clontech 632180) were grown in DMEM, high glucose, GlutaMAX Supplement, pyruvate (LifeTech 10569044) plus 10% FBS (Clontech 631367) and passaged every other day and split approximately 1:8 so that they were nearly confluent at the time of splitting. (Cells were kept in culture for less than a month before a new vial was thawed.) Cells were dissociated with TrypLE Express Enzyme 1× (Lifetech 12604013) and passaged as a single cell suspension. A nearly confluent plate was split approximately 1:8 as a single cell suspension so that two days later the plate was nearly confluent again. These cells were then plated as a single cell suspension in 24-well plates in 0.6 ml of DMEM/10% FBS per well with 150,000 cells per well one day before transfection. Cells were never allowed to reach 100% confluency before transfection. Constructs for the expression of effectors and guide RNAs (crRNAs) transformed into HEK293T included those of Table 24.

TABLE 25
Effector Constructs used to Transform HEK293T Cells

| | Effector gene (codon optimized | crRNA expression |
|---|---|---|
| Construct | for expression in human cells) | cassette |
| AsCpf1 | SEQ ID NO: 180 | SEQ ID NO: 190 |
| Smp2Cpf1 | SEQ ID NO: 142 | SEQ ID NO: 154 |
| BdMmc3 | SEQ ID NO: 143 | SEQ ID NO: 155 |
| NoMmc3 | SEQ ID NO: 140 | SEQ ID NO: 154 |
| SfMmc3 | SEQ ID NO: 145 | SEQ ID NO: 157 |
| CrpMmc3 | SEQ ID NO: 181 | SEQ ID NO: 191 |
| NapMmc3 | SEQ ID NO: 182 | SEQ ID NO: 192 |
| ObpMmc3 | SEQ ID NO: 183 | SEQ ID NO: 193 |
| SfpMmc3 | SEQ ID NO: 184 | SEQ ID NO: 194 |
| ShMmc3 | SEQ ID NO: 146 | SEQ ID NO: 195 |
| SmpMmc3 | SEQ ID NO: 185 | SEQ ID NO: 196 |
| SvMmc3 | SEQ ID NO: 186 | SEQ ID NO: 158 |
| No2Mmc3 | SEQ ID NO: 187 | SEQ ID NO: 197 |
| PcMmc3 | SEQ ID NO: 188 | SEQ ID NO: 198 |
| Sv2Mmc3 | SEQ ID NO: 189 | SEQ ID NO: 199 |

[0248] Cells were transfected one day after plating using Lipofectamine™ LTX Reagent with PLUS™ Reagent (Lifetech 15338100). DNA (0.5 μg) was mixed with 25 μl Serum Free Opti-MEM (Lifetech 51985091) and 0.5 μl of Plus reagent is added. 2 μl of Lipofectamine LTX was diluted in 25 μl of serum free Opti-MEM and added to the diluted DNA. This was incubated at room temperature for 5 minutes before adding to cells. The following day the cells were passaged into one well of a 6 well plate in RPMI 1640 Medium, GlutaMAX Supplement (LifeTech 61870127) plus 10% FBS (Clontech 631367). Two days post transfection the media was changed back to DMEM/10% FBS.

[0249] Analysis of Mammalian HEK293T Cells Transformed with Mmc3 Effectors and Guide RNAs

[0250] Three days after transfection the cells are made into a single cell suspension, spun down and resuspended in 50 μl FACs buffer and 2 μl CD46 Monoclonal Antibody (MEM-258), APC (Lifetech A15711). Cells are stained 20-30 min in PBS+2% FBS+0.2% sodium azide at 4° C., washed with 750 μl buffer and resuspended in 200-400 μl buffer for flow cytometry analysis performed as provided in Example 10.

[0251] Loss of CD46 expression on the cell surface of GFP-expressing cells can be visualized in scatter plots as loss of APC fluorescence with respect to controls (see FIG. 34). To determine the presence of INDELS at both the CD46_540 protospacer and the CD46_541 protospacer the CD46 region can be sequenced as provided in Example 10.

### Example 13

### Mmc3 Editing in Planta

[0252] To test for editing ability of Mmc3 in plants, genes encoding the BdMmc3 (SEQ ID NO:161), NoMmc3 (SEQ ID NO:162), NapMmc3 (SEQ ID NO:163), SfMmc3 (SEQ ID NO:164), SmpMmc3 (SEQ ID NO:165), Smp2Mmc3 (SEQ ID NO:166), and FnCpf1 (SEQ ID NO:167) effectors were codon optimized for Oryza sativa (rice) with an N-terminal NLS (SEQ ID NO:168). The engineered Mmc3 genes were cloned into agrobacterial binary vector pCAMBIA1380 under the control of either a ZmUbi promoter (SEQ ID NO:169) or a CaMV promoter (SEQ ID NO:170) and followed by a Nos terminator (SEQ ID NO:171). The pCAMBIA1380 vector includes a gene conferring resistance to hygromycin (HygR). The same vectors included a crRNA expression cassette that included a Rice U6 promoter (SEQ ID NO:172) operably linked to a processed crRNA repeat sequence specific to the Mmc3 being tested, followed by the spacer sequence CAO1sp1 (SEQ ID NO:173), targeting the chlorophyll a oxidase 1 (CAO1) gene, and followed by the U6 terminator (SEQ ID NO:174). In other constructs, the pCAMBIA1380 vector included a CRISPR array targeting two locations in the CAO1 gene that consisted of a rice U6 promoter operably linked to a crRNA repeat specific for the Mmc3 being tested followed by spacer sequence CAO1sp1 (SEQ ID NO:173), followed by another copy of the crRNA repeat sequence, which was followed by a spacer, CAO1sp3 (SEQ ID NO:175), targeting another site in the CAO1 gene, followed by the U6 terminator SEQ ID NO:174).

[0253] Agrobacteria-mediated transformation of rice callus was performed essentially as described by Sah et al. (Amadeep Kaur, S. K. S. (2014) Genetic Transformation of Rice: Problems, Progress, and Prospects. Rice Research: Open Access 03(01):1-10.) Briefly, callus tissue was generated by incubating rice grains on callus induction media in light at 28° C. for two weeks which promotes the scutellum to divide and produce callus. Calli were removed from the rice grain and incubated a further two weeks on callus induction medium. For transformation, the callus was combined with Agrobacteria carrying either of the constructs described above. After 20 minutes of gentle shaking the liquid was removed and the callus was air dried for one hour and then placed on co-cultivation medium in the dark at 25° C. for 3 days. The callus was then washed 5 times with an anti-Agrobacterial antibiotic to kill the Agrobacteria. The callus was then placed on selection medium which contained anti-Agrobacterial antibiotic and a low concentration of hygromycin for selection of T-DNA insertions. The plates were incubated in light at 28° C. for six days. The callus was then moved to Selection II medium, which contained a higher concentration of hygromycin. The plates were incubated in light at 28° C. for fourteen days. Hygromycin-resistant calli were removed and either placed on fresh medium to grow larger, or immediately used for preparation of genomic DNA using a standard CTAB method as described in Lukowitz et al., 2000 (Plant Physiology 123: 795-805). Remaining callus was moved to fresh Selection II medium and allowed to grow at 28° C. for an additional fourteen days before re-screening for transgenic callus. Hygromycin-resistant calli were removed and either placed on fresh media to grow larger, or immediately used for preparation of gDNA using standard methods as described above.

[0254] Callus can be screened for INDELS at the targeted locations within the CAO1 genes by PCR and next generation sequencing methods. For callus gDNA, PCR with primers Index-Sp1-F1 (SEQ ID NO:176) and Index-Sp1-R2 (SEQ ID NO:177) are used to generate a 202 bp amplicon that spanned the CAO1 region targeted by spacer CAO1sp1. PCR primers Index-Sp3-F2 (SEQ ID NO:247 and Index-Sp3-R2 (SEQ ID NO:179) are used to generate a 157 bp amplicon that spans the CAO1 region targeted by spacer CAO1Sp3 (SEQ ID NO:175). PCR primers Index-Sp3-F1 (SEQ ID NO:178) and Index-Sp3-R2 (SEQ ID NO:179) are used to generate a 208 bp amplicon that spans the CAO1 region targeted by spacer CAO1Sp3. PCR products for each callus are pooled according to the construct tested and purified to remove primers and high molecular weight DNA. A second PCR round is then performed to append Illumina barcodes and sequencing adapters. Indexed amplicons are sequenced on a MiSeq or NextSeq platform. Sequence reads are parsed by barcodes, then trimmed to remove adapter illumina barcode and adaptor sequences. Trimmed sequences are aligned to reference sequences and queried for the presence of INDELS proximal to the specified spacer target site.

[0255] Alternatively, gDNA can be used as a template for PCR amplifying the region targeted for mutation and Surveyor assays can be performed to detect calli with indels in the target region. A PCR product that is positive for indels can be cloned and squenced to confirm the location of the indel.

### Example 14

### Targeted Gene Editing in Nannochloropsis gaditana with BdMmc3

[0256] A gene that included sequences encoding BdMmc3, codon optimized for Nannochloropsis (SEQ ID NO:209) and that included sequences encoding an NLS, FLAG epitope tag, and flexible linker (SEQ ID NO:210, amino acid sequence SEQ ID NO:211) at the C terminus was operably linked to the RL24 promoter from Nannochloropsis (SEQ ID NO:212) and, at the 5′ end of the BdMmc3 gene, the Nannochloropsis Terminator 2 (SEQ ID NO:213). The expression cassette was designed to express and localize to the nucleus the BdMmc3 effector protein (SEQ ID NO:1) in Nannochloropsis, a Eustigmatophyte algae.

[0257] A crRNA expression cassette was also designed for expression in Nannochloropsis. A 28-nucleotide spacer sequence from the LAR1 gene of Nannochloropsis (see, US 2014/0220638, incorporated herein by reference) was cloned so that it was flanked on both the 3′ and 5′ end by the BdMmc3 repeat sequence (SEQ ID NO:28). Three different spacers were tested in the guide constructs, all of which targeted the LAR1 gene: CC1 (SEQ ID NO:214), CC2 (SEQ ID NO:215), and CC3 (SEQ ID NO:216). The repeat-spacer-repeat guide RNA sequence was flanked on the 5′ end by the HH ribozyme sequence (SEQ ID NO:217) and on the 3′ end by the HVD ribozyme sequence (SEQ ID NO:218) (FIG. 36A). The resulting construct was designed for in vivo expression in Nannochloropsis by operably linking a functional N. gaditana promoter (EIF3, SEQ ID NO:219) and terminator (Terminator 9, SEQ ID NO:220) to the 5′ and 3′ ends, respectively of the ribozyme construct. Upon expression in N gaditana, the ribozyme sequence domains will undergo autocatalytic cleavage, which gives rise to a functional processed BdMmc3 guide RNA (FIG. 36A).

[0258] The expression cassettes for the BdMmc3 effector and guide RNA described above were cloned into a functional selectable marker cassette for N. gaditana which confers resistance to blasticidin (BSD) and also harbors a green fluorescent protein (GFP) expression cassette as described for expression of Cas9 in US 2017/0073695, incorporated herein by reference. The expression cassettes for BdMmc3 and the guide RNA are cloned in between the BSD and GFP expression cassettes as depicted in FIG. 36B. Expression constructs that included BdMmc3 effector gene and a CC1, CC2, or CC3 guide cassettte were transformed into N. gaditana by electroporation essentially as described in US 2014/0220638, and transformants were selected on agar plates or in liquid medium containing blasticidin.

[0259] To examine the LAR1 locus for genome editing events, DNA is isolated from pooled transformants and used to PCR amplify ˜150 to ˜170 bp regions of the genome that encompass the protospacers corresponding to the spacer sequences used in the guides (CC1, CC2, and CC3). PCR amplicons are sequenced and sequences are compared to the wild type locus to determine whether insertions/deletions are present that validate the genome-editing function of BdMmc3.

### Example 15

### Nuclease Assays

[0260] Cloning and Preparation of NoORF3

[0261] The NoMmc3 ORF3 gene (SEQ ID NO:226 encoding SEQ ID NO:6) was cloned into the pET28 vector using a two step Gibson assembly (Gibson et al. Nature Methods (2009) 6: 343-345). The pET28 vector included a sequence encoding a peptide tag (SEQ ID NO:248) recognized by Streptavidin (IBA Lifesciences, Gottintgen, Germany) that resulted in the peptide tag being added on to the NoMmc3 effector at the C-terminus. The Gibson reaction was used to transform the EPI300 cell line. Four colonies were selected and grown in LB liquid media containing 50 μg/mL Kanamycin for 12 hours at 37° C. Plasmid extractions were performed on each of the cultures. The successful cloning of ORF3 was determined by restriction enzyme analysis and Sanger sequencing.

[0262] The sequence-confirmed DNA encoding the tagged ORF3 was used to transform E. coli BL21 (DE3) cells purchased from New England Biolabs (Ipswich, Mass.). The transformants (100 μL) were dispersed on an LB plate containing 50 μg/mL of kanamycin and incubated for 18 hours at 37° C. A single colony was picked to grow in a small 5 mL LB liquid culture containing 50 μg/mL kanamycin. After 8 hours of incubation at 37° C., 1 mL of liquid culture was used to inoculate 1 L of LB media containing 50 μg/mL kanamycin. Cultures were incubated at 37° C. with 200 RPM agitation. Once the cultures reached an O.D. of 0.5, the cultures were placed in a 4° C. cooler for 30 minutes to chill the cultures. Once the cultures were chilled, 0.25 mL of 1M IPTG was added to each flask to induce expression of the ORF3 gene. Cultures were incubated overnight at room temperature.

[0263] The next day, cells were harvested by centrifugation at 5000×g for 15 minutes. Cell pellets were solubilized in 25 mM Tris (pH 8.0), 300 mM KCl, 10% glycerol, 5 mM MgCl₂, and 1 mM adenosine-5′-triphosphate (ATP), lysozyme (1 mg/mL), DNaseI (1 U/mL), phenylmethanesulfonyl fluoride (0.1 mg/mL), and complete protease inhibitor tablets were added to the lysis buffer. Cells were re-suspended and lysed by sonication. Cells were pulsed at 70% amplitude with 30 second bursts for a total of 5 minutes. The lysate was frozen in the −80° C. freezer until further use.

[0264] The lysate was thawed and centrifuged at 10,500×g for 45 minutes to remove the cell membrane. The supernatant was collected in a 250 mL bottle chilled on ice and loaded onto a 5 mL Streptactin XT superflow column from IBA Lifesciences (Gottintgen, Germany) After the supernatant was run through the column, the column was washed with 2 column volumes of buffer A (25 mM Tris pH 8.0, 300 mM KCl, 10% glycerol, and 5 mM MgCl₂) buffer before starting a linear gradient with buffer B (buffer A containing 5 mM D-desthiobiotin) for 5 column volumes. The protein elution was monitored by UV-vis spectroscopy and fractions containing protein were pooled, analyzed by SDS-PAGE, and concentrated using a molecular weight cutoff of 10 kDa. NoMmc3 ORF3 polypeptide was stored in an eppendorf tube in the −80° C. freezer.

[0265] Preparation of Mammalian Cell Lysates

[0266] HEK293T mammalian cell lines expressing the AsCpf1 (SEQ ID NO:81) and Smp2Cpf1 (SEQ ID NO:200) effector proteins and crRNAs (SEQ ID NO:190 for the AsCpf1 crRNA and SEQ ID NO:154 for the Smp2Cpf1 crRNA) as provided in Example 10 were cultured on plates prior to harvesing and lysate production. For harvesting cells, plates were placed on ice and the media was removed from the plates and the cells washed in 5 mL of PBS buffer. Lysis buffer (400 μL per plate of a buffer that included 25 mM Tris pH 8.0, 100 mM NaCl, 5% glycerol, 0.2% Triton X100, and 1 protease inhibitor tablet per 10 mL) was added and the cells scraped from the plate. The cell harvesting step was repeated with an additional 300 uL of lysis buffer. The cells were re-suspended in the buffer and centrifuged at 13k×g for 10 minutes at 4° C. The supernatant was aliquoted into chilled Eppendorf tubes (200 μL) and stored in the −80° C. freezer.

[0267] Activity Assays with Mammalian Lysate

[0268] Assays were conducted in buffer (25 mM Tris pH 8.0, 100 mM NaCl, and 5% glycerol) and contained approximately 500 ng/μL of a pUC19 plasmid that included the CD46 exon 1 (SEQ ID NO:152), 15 μL of lysate, and 10 μM NoMmc3 ORF3 polypeptide. Reactions were performed by incubating in a thermocycler set to 37° C. for 30 minutes and quenched by heat inactivation at 85° C. for 5 minutes. The DNA was extracted using the Genomic DNA Clean & Concentrator kit (Zymogen, Tustin, Calif.). The resulting DNA was eluted with 2×10 μL of nuclease free water. The purified DNA was digested using 0.5 μL PvuI-HF restriction enzyme and 2 μL of 10× CutSmart® buffer (New England Biolabs, Ipswich, Mass.). The restriction digestion was incubated at 37° C. for 1 hour. The resulting digestion was separated on a 1.0% agarose gel and imaged using a Typhoon imager. Cut DNA fragments were quantified using ImageJ software.

[0269] In assays containing linearized DNA substrate, The CD46-pUC19 vector was digested with PvuI and linear DNA purified prior to setting up assays. Assays were performed as described above but without the restriction digest step.

[0270] FIG. 37 shows the results of nuclease assays in lysates of HEK293T cells expressing the AsCpf1 and Smp2Cpf1 effector proteins and crRNAs targeting CD46 exon 1 with and without the NoMmc3 ORF3 polypeptide. It can readily be seen that the lower band on the gel which results from cutting of the target plasmid is increased in both Cpf1 effector samples that include Mmc3 ORF3 with respect to the lysates that were assayed without the addition of Mmc3 ORF3. The enhancement of nuclease activity is especially striking for the Smp2Cpf1 effector. FIG. 38 shows a gel with successive samples of a time course of the same assay format using the Smp2Cpf1 effector lysate, in which nuclease activity is observed to increase steadily after about nine minutes in the presence of the Mmc3 ORF3 polypeptide and after about fifteen minutes in the absence of the Mmc3 ORF3 polypeptide, and in which the presence of the Mmc3 ORF3 polypeptide is associated with increased cutting of the target DNA at all timepoints where cutting is observed. FIG. 38 shows a time course of the same assay format using the Smp2Cpf1 effector/crRNA lysate where the crRNA included 22 nt of the NoMmc3 spacer followed by the 540 spacer (SEQ ID:249). The presence of the Mmc3 ORF3 polypeptide results in a consistent increase of nuclease activity after about 9 minutes whereas lack of the Mmc3 ORF3 polypeptide resulted in a slower observable onset of nuclease activity after about 15 minutes. In result, the presence of Mmc3 ORF3 polypeptide is associated with dramatically increased cutting of the target DNA. The results of a 30 minute assay of two Cpf1 effectors, AsCpf1 and Smp2Cpf1, with and without added Mmc3 ORF3 polypeptide are directly compared in FIG. 39. Analysis of band intensities provides that the presence of the ORF3 polypeptide resulted in 1.6 fold the control (no ORF3 polypeptide present) amount of cutting when AsCpf1 was used as the effector, and 9-fold the control level of cutting when Smp2Cpf1 was the effector, for a significantly greater amount of cutting than was observed to occur when AsCpf1 was the effector.

1. An engineered, non-naturally occurring Clustered Regularly Interspersed Short Palindromic Repeat (CRISPR)-CRISPR associated (Cas) (CRISPR-Cas) system comprising:
a) an Mmc3 effector polypeptide, or one or more nucleotide sequences encoding an Mmc3 effector polypeptide, wherein the Mmc3 effector polypeptide:
comprises an amino acid sequence selected from the group comprising SEQ ID NO:1, SEQ ID NO:2, SEQ ID NO:3, SEQ ID NO:4, SEQ ID NO:5, SEQ ID NO:6, SEQ ID NO:7, SEQ ID NO:8, SEQ ID NO:9, SEQ ID NO:12, SEQ ID NO:16, SEQ ID NO:17, SEQ ID NO:18, SEQ ID NO:19, SEQ ID NO:20, SEQ ID NO:21, SEQ ID NO:22, SEQ ID NO:23, SEQ ID NO:24, SEQ ID NO:25, and SEQ ID NO:26; or
comprises a variant of an Mmc3 effector comprising an amino acid sequence having at least 60%, 65%, 70%, 75%, 80%, 85%, 90%, or 95% identity to an amino acid sequence selected from the group consisting of SEQ ID NO:1, SEQ ID NO:2, SEQ ID NO:3, SEQ ID NO:4, SEQ ID NO:5, SEQ ID NO:6, SEQ ID NO:7, SEQ ID NO:8, SEQ ID NO:9, SEQ ID NO:12, SEQ ID NO:16, SEQ ID NO:17, SEQ ID NO:18, SEQ ID NO:19, SEQ ID NO:20, SEQ ID NO:21, SEQ ID NO:22, SEQ ID NO:23, SEQ ID NO:24, SEQ ID NO:25, and SEQ ID NO:26; or
comprises the amino acid sequence of a naturally-occurring Mmc3 effector having at least 30% identity to an amino acid sequence selected from the group consisting of SEQ ID NO:1, SEQ ID NO:2, SEQ ID NO:3, SEQ ID NO:4, SEQ ID NO:5, SEQ ID NO:6, SEQ ID NO:7, SEQ ID NO:8, SEQ ID NO:9, SEQ ID NO:12, SEQ ID NO:16, SEQ ID NO:17, SEQ ID NO:18, SEQ ID NO:19, SEQ ID NO:20, SEQ ID NO:21, SEQ ID NO:22, SEQ ID NO:23, SEQ ID NO:24, SEQ ID NO:25, and SEQ ID NO:26; and
b) one or more engineered guide RNAs comprising a guide sequence, wherein the one or more guide RNAs is designed to form a complex with the Mmc3 effector polypeptide and wherein the one or more guide RNAs comprises a guide sequence designed to hybridize with one or more target nucleic acid molecules,
wherein the guide RNA and the Mmc3 effector polypeptide do not naturally occur together.

2. A CRISPR-Cas system according to claim 1, wherein the guide RNA forms a complex with the Mmc3 effector and wherein the guide RNA hybridizes to the one or more target nucleic acid molecules, resulting in cleavage of the target nucleic acid molecule.

3-10. (canceled)

11. The CRISPR-Cas system of claim 1, wherein the target nucleic acid is a prokaryotic or a eukaryotic target nucleic acid.

12-15. (canceled)

16. The CRISPR-Cas system of claim 1, wherein the nucleotide sequence encoding the Mmc3 effector polypeptide is codon optimized for expression in a eukaryotic cell.

17. The CRISPR-Cas system of claim 1, wherein the Mmc3 effector polypeptide comprises at least one nuclear localization sequence (NLS).

18. The CRISPR-Cas system of claim 1, comprising two or more guide RNAs.

19-24. (canceled)

25. A method of modifying one or more target nucleic acid sequences in vivo, comprising delivering to a cell comprising one or more nucleic acid molecules comprising one or more target nucleic acid sequences a non-naturally occurring or engineered composition comprising:
a) one or more polynucleotide sequences comprising one or more guide RNAs, or one or more polynucleotide sequences encoding one or more guide RNAs, wherein the one or more guide RNAs is capable of hybridizing with one or more target nucleic acid sequences, and
b) an Mmc3 effector polypeptide, or one or more nucleotide sequences encoding an Mmc3 effector polypeptide; wherein the Mmc3 effector polypeptide:
comprises an amino acid sequence selected from the group comprising SEQ ID NO:1, SEQ ID NO:2, SEQ ID NO:3, SEQ ID NO:4, SEQ ID NO:5, SEQ ID NO:6, SEQ ID NO:7, SEQ ID NO:8, SEQ ID NO:9, SEQ ID NO:12, SEQ ID NO:16, SEQ ID NO:17, SEQ ID NO:18, SEQ ID NO:19, SEQ ID NO:20, SEQ ID NO:21, SEQ ID NO:22, SEQ ID NO:23, SEQ ID NO:24, SEQ ID NO:25, and SEQ ID NO:26; or
comprises a variant of an Mmc3 effector comprising an amino acid sequence having at least 60%, 65%, 70%, 75%, 80%, 85%, 90%, or 95% identity to an amino acid sequence selected from the group consisting of SEQ ID NO:1, SEQ ID NO:2, SEQ ID NO:3, SEQ ID NO:4, SEQ ID NO:5, SEQ ID NO:6, SEQ ID NO:7, SEQ ID NO:8, SEQ ID NO:9, SEQ ID NO:12, SEQ ID NO:16, SEQ ID NO:17, SEQ ID NO:18, SEQ ID NO:19, SEQ ID NO:20, SEQ ID NO:21, SEQ ID NO:22, SEQ ID NO:23, SEQ ID NO:24, SEQ ID NO:25, and SEQ ID NO:26; or
comprises the amino acid sequence of a naturally-occurring Mmc3 effector having at least 50% identity to an amino acid sequence selected from the group consisting of SEQ ID NO:1, SEQ ID NO:2, SEQ ID NO:3, SEQ ID NO:4, SEQ ID NO:5, SEQ ID NO:6, SEQ ID NO:7, SEQ ID NO:8, SEQ ID NO:9, SEQ ID NO:12, SEQ ID NO:16, SEQ ID NO:17, SEQ ID NO:18, SEQ ID NO:19, SEQ ID NO:20, SEQ ID NO:21, SEQ ID NO:22, SEQ ID NO:23, SEQ ID NO:24, SEQ ID NO:25, and SEQ ID NO:26;
wherein the one or more guide RNAs form one or more complexes with theMmc3 effector polypeptide, and wherein the one or target nucleic acid molecules is modified by the Mmc3 effector.

26-27. (canceled).

28. The method of claim 25, wherein the percentage of target nucleic acid cleavage is at least 4%, and wherein the target nucleic acid cleavage is determined by plasmid interference assay, PCR, gel electrophoresis, genome sequencing, surveyor assay, and/or a phenotypic assay.

29-33. (canceled)

34. The method of claim 25, wherein the cell is a eukaryotic cell.

35. The method of claim 34, wherein the nucleotide sequence encoding the Mmc3 effector polypeptide is codon optimized for expression in a eukaryotic cell.

36. The method of claim 34, wherein the Mmc3 effector polypeptide comprises one or more NLSs.

37. The method of claim 25, wherein one or more polynucleotide sequences encoding one or more guide RNAs and the nucleotide sequence encoding said Mmc3 effector polypeptide are operably linked to one or more regulatory elements.

38. The method of claim 37, wherein the regulatory element is selected from the group consisting of a promoter, an enhancer, an internal ribosomal entry sites (IRES), a 5′-untranslated region, and a 3′-untranslated region.

39. The method of claim 25, wherein the non-naturally occurring or engineered composition is delivered inside a cell or a cellular organelle via electroporation, nucleofection, lipofection, calcium phosphate precipitation, bacterial conjugation, or a delivery vehicle comprising liposome(s), particle(s), exosome(s), microvesicle(s), a gene-gun, a virus, or one or more viral vector(s).

40. The method of claim 39, wherein the non-naturally occurring or engineered composition is delivered inside a cell or a cellular organelle via a viral vector.

41. The method of claim 25, wherein one or more polynucleotide sequences comprising one or more guide RNAs is delivered to a cell that has previously been transformed with a nucleic acid sequence encoding an Mmc3 effector.

42. The method of claim 25, wherein the non-naturally occurring or engineered composition further comprises:
an Mmc3 ORF3 polypeptide, or one or more nucleotide sequences encoding an Mmc3 ORF3 polypeptide.

43-50. (canceled)

51. An engineered, non-naturally occurring CRISPR-Cas system comprising one or more nucleic acid constructs comprising:
a) a Cpf1 effector polypeptide, or one or more nucleotide sequences encoding a Cpf1 effector polypeptide, wherein the Cpf1 effector polypeptide comprises an amino acid sequence having at least 95% identity to SEQ ID NO:200; and
b) a polynucleotide sequence encoding a guide RNA, wherein the guide RNA is designed to form a complex with the Cpf1 effector polypeptide and wherein the guide RNA comprises a guide sequence designed to hybridize with one or more target nucleic acid molecules,
wherein the guide RNA and the Cpf1 effector polypeptide do not naturally occur together.

52. An engineered, non-naturally occurring CRISPR-Cas system according to claim 51, wherein the polynucleotide sequence encoding the Cpf1 polypeptide and the polynucleotide sequence encoding a guide RNA are located on the same or different nucleic acid constructs of the system, wherein when transcribed, the one or more guide RNAs forms one or more complexes with the Cpf1 effector polypeptide, and wherein the one or more guide RNAs hybridizes to the one or more target nucleic acid molecules, resulting in cleavage of the target nucleic acid molecule.

53. The CRISPR-Cas system of claim 51, wherein the system further comprises an Mmc3 ORF3 polypeptide or a nucleotide sequence encoding an Mmc3 ORF3 polypeptide.

The application's sequence listing, which the Patent Office published only in electronic form, follows.

SEQUENCE LISTING (249 sequences)

SEQ ID NO: 1 - protein, 1240 aa, Unknown
  Unknown bacterial species
  misc_feature: BdMmc3 effector
MENYINKYQISKTLRFGLIANERKVKKENEHKIKQENLYKSHSELKDLIEISEKNIKKNLPKNAVQAQLPINTIRKCIDEIKEHLKSWEQVHTRYDQIAVLKDFYRKLERKARFDGFWKDKNRVRQPQSQEITLSSLKYKYENKEIKDHIIGYWAKNIRKTKEKLNEVDIVLQRFEEARKENRTDKMLNEVELRKLFLSLTSLVNEVLGPLIRRSIQFPNAEKLTESNEDKKVKEFAFNGKKETLFDSIIVLKAYFQENGGYVPYGRVTMNKFTALQKPNKTDGEIDEVIKTLKLKEFLSEYKDITSLDRKLESSKDKKDALKDNSLSLIERVQYFKYKTIPIGVQFALSEYLSKNEIEQKRIFELLESIGKPKSPAKDYADLENKNDFDLYKYPLKVAFDYAWESLAKYEYHKNIDFPKDKCKFFLKDTFNFDTDNKDFKLYADLLFIRENLATLDYSNPNDKNVHIRNISSAFDKIDSRLNQKQKSATKNILAWHKGNLSKEIVYQNAKQEIGRLRGGLKNKVSDFLSLTNIFKEIAPEFGRQFANLRDKFNEENEINKISHYGAIVEDSNKDRYLLIYPLNDDRDGVDTIFPEDGKVGFKMYMAKSLTSKTLWKFICNQKGVSEDFHKKDKKWNIPKTQFGKVDKAKLDEDYNLKNVIDCLQNSNMAKAQKWNEFGWDFTHCRTYSDIEKEVDRKGHLLKDNNHISMEKLEELINKDRCLLLPIVNQDLIRQDRIPKNQFTKDWSKIFTSDRSYRLHPEFNVSYRHATPNYPKPEEKRYSRFQMIAHFQCEIVPQIDNYISKKEQIKIFNDKEIQTNEVAKFNNNLIISEDYMIFGIDRGLKQLATLCVLDKNGKIQGDFKIYTRYFDTDKKQWIHELLEKKRDILDLSNLRVETTIRGDKVLVDLNEVEVKEKDKEDKYKKNPDGTYVYTKENQQKIKLKKLAYIRKLQFKMQTESQKVLDFAKQNTTEQAVIENIQNLISPYKEGKNYDDLPADVILNMLQQFKEFSENADTQSIRELIELDATDNLKSGVVANMIGVIVYLLMEKYNGKAIIALEDLTRAFSFSKDGLNGYALFGTNYDETVDFKEQENLALAGTGTYQFFEMQLLKKLFKIGQEQNVLTVPAFRSVDNYEKIVRRDKQNSGDEFVNYPFGIVTFVDPKFTSKRCPKCGKTNVNRKDNIVTCKDKNCGFQTKDGNSFEANNIHFITNGDQNGGYHIALKALKNINIKDNQNNHD

SEQ ID NO: 2 - protein, 1297 aa, Sulfuricurvum sp.
  misc_feature: SfMmc3 effector
MENIKNGYQLSKTLRFGLTQKCKKRRKNYEGEIYESHKELNDLIMFSEERIKQSLSIDKKSELQFSINNIEKCLLLVDNFFFSWQQVYQRDDQIALDKDYYKILCKKIGFNGFWTERRREQRVKKPQSRVISLSELKKPDELGKKRFQYILDYWRENLLNVAEKYNVVSEKLKQFQDALKINRTDNKPNEVELRKSFLSLLHLVNDTLMPLCYGQILFPKIEKLDSSKSHNQKLIEFATDHQSKSDLLSEITEIKKYFEENGGNVPFCRATLNPNTAIKNPKSSDNKIEEEINIIGLSNILKEHKSVLFYDKYLEDLSVKEKINLLKNKDSNSITRSLMFKCKSVPAIVQYEIAKTLSRKLDKSEEDIRNFLRGIGQAKSPAKDYADLQNKNDFNIEAYPLKVAFDFAWEGLARSIYHPDASFPLEQCRRFLNDNFGVNKEDNNFQLYAKLQELRDYLSVLEHNKLKDGTAQINAAREIIESLDWQKNFGDRGNGYKRSITVWLNKWKPNLQDNDDTDFKTAKQQIGLFRGSLKNKIKKYYEITQTYKDIAMQTGRTFAKMRDKISGAAELNKVSHYAMIIEDSNADKYVLLQEFTEKKGDRIYAKTDYNNGDITAYAVNSVTSGAIAKMIKKKRLDSFNDKYGESTFQQQELTKEQKEQKNIREWKSFIEEKRWDLEFKLNTKVKTFEQLKKEIDSKCYELNKKYISRDVLDDLINNKNCLLLPIVSQDLAKKEKSEINQFTKDWNAVFAQNTPWRLTPEFRISYRKPTPNYPESDKGDKRYSRFQMIGHFLCDYIPKNDYYISTREQIAIYKDDKQQETAVNRFHDKLKGRTEAEEHVDSINALIAKFGSVNKKQKSIVVDKPKEEFYVFGIDRGQKELATLCVIDHNKKIIGNFDIYVRSFNSISKQWEHKFLEKRHILDLSNLRVETTLFIDGKPEKRKVLVDLSEVKVKDKNGNFTKPDKMQIKMQQLAYIRKLQFQMQTNPDVVLAWYEKNSTKEMMLKNFVKKSDDDNNGLVSFYGAAVEELENTLPIERISEMLQKFDLLKKQEKEGEDIKLQIDKLVQLDPVDNLKSGVVANMVGVIAFLLQQFEYQVYISLEDLSEPFSNQITGGITGVPLSVSKGDGRRVDVEKYAGLGLYNFFEMQLLKKLFRIQQNNETILHLVPAFRAQKNYDHVAVGKGKIKNQFGIVFFVDANATSKTCPVCGTTNNNPNKKEYPTAQTGISQEGKEVWIERDKSGGNDIIRCFVCGFDTTKKYTENPLKYIKSGDDNAAYLISAKGIKAYELAITLTDNK

SEQ ID NO: 3 - protein, 1285 aa, Sulfuricurvum sp.
  misc_feature: SvMmc3 effector
MKKNENKYQLSKTLRFGLTLKEKISNNEKTPYQSHSQFRDLIILSENRIREGISTPQNRDLPSFIHRIQNCTDFINDFIHDWWMILMHTGQIELDKDYYKSLTKKVGFVGFWYKENKKKGGKTKQPQARNIPMGELRHLCPQNTKECATYITDYWKDLLITAANKLHESSEQQKKFIKAMEQNRTDNKPNEIDLKKSFLSLVSVTMELLNPILNGQILFNKMDRLDMSKKSDNDFIDFVNDHETVRELNNDIEEIIADFKENGNNVNYCKATLNPDTALKQHNNNIPNDIATDLEELMMDSIVGNYDDVNSFMDNCVSNLSAKEKIRIIKDSNISLIYRAILFKYKMIPANVRRDIAQGMAKKINKDEENIYSFLCEFGTLRTPQKDYADLKDKNSFNLNDYPLKVAFDFAWEGLAKAQHHDQSDFPFDLCRNFLQENFDVNLEENQDFLLYADLIELNALLSTLDKGNPADPDSIIKKALDMVEQINWDSFDEKRGNEYKKRGNEYKRVIINRLNFSKDDEKYERIKKEISMSRGRLKNKIKKYDDLTSQYKRIAMDLGKKFASLRDKIIDANEDNKVTHYAMILEDSNCDKYLLLQKVSNNIEDNIYHCMSYDSSDPKAYYVDSITSSAIAKMIRKETNPSKIREYAELEEKERERRNVDDWCRFISKKEYDRRYQLNINNGLSFEALKKEIDSKSYILVKKNISVDSIRELVENEGCLLFPIVNKDLTKERKTTEDNQFTKDWNMIFSGSETNWRLTPEFRVTYRNPVPGYPNDKFGSKRYSRFQMNAHFVCDFIPSSNSYTSNREQIAIFKDEGEQKKRVEEFNRTLSNINQKFYVIGIDRGQKELATLCVVDQDKKIHGDFKIYTRQFNSERKQWEHYSLEGEKGTRNILDLSNLRVETTIMIDGKPERRQVLVDLSEVKVKDKEGNYTKPNKMQIKMQQMAYVRKLQFQMQANPTEVLEWYEQNPTEELIIKNLVDKENGEKGLISFYGTALVELDQTLPVSKTKEMLEEFKILKQRESKKENVQKELNSLTQLEAVDSLKAGIVANMVGVISYILKTLDYNAYISLEDLSTAQSSPEFASGISGAITKMSREEGRRIDVEKYAGLGLYNFFEMQLLRKLHHIQTDSGNILHLVPAFRAQKNYDHIMVGKEKIKNQFGIVFFVDAAATSIKCPRCGAVNKEDFHPDKQKYPDAEKGPNLRNGKEQSGKKVWVTRDKEDEDRIKCYCCGFDTKEKNEGNPFMYIKSGDDNAAYLISDLGVESYRKAYELAATVVEDRKKH

SEQ ID NO: 4 - protein, 1032 aa, Unknown
  Unknown bacterial species
  misc_feature: NapMmc3 effector
MENSNLYQVVKTIRFKLEPVGKMDTPKFGDKNAESKANLTPFIELVKKTMTNVKALVFSKQDGEDGEKWRKILEVNYRFLRSYLKNSFYENRGDSQEKSKKHKISDLEYLQKALENLFAEFDEILDGLEDFEKRNTKNQYEKQRHAQAGLLLNRLCKRSNFGFLKAFVGALAQTNKPFFDDKTDKLKKQIDKFETELEKQKEFFLPYQSNGVLFAGGSFNRYAINKTPKMLDKELREEQTNLKKSLCEHKIKIDTLNTLGLKNDCPCTSLDNSYTFIKDYKAKQKSKFIELVQKGEFDEAKKVNLFECSETDFETFKTRTKQIQNEKDKDERTKLKQKRGEFFKSQKRGKFFKSQTQNYENLCDLYKKIAQKRGQIVAKICAIKKEKEMCEQVKYWCVALEKGGEFYLYMFLRDENDNIKNAYDFVSKLQTQKSGETKLHYFDSLTLKAVRKLCFKETDGSFKKALKNVKFPECEQNLDEKVKISFYQNVLKNAKTLNLSKFENLQSVTEGKFESLSEFEVALNMVCYTKTVCVSESVEKELKKFKPLVFHITSQDLAAKREKKAHTQIWHEFWRESNEKSKFPLRLNPELKVMWREARPSRVEKYAEQSDKFDPNKKNRYLHPQFTLALNFTQNAHNEAINLAFKDVQNKGEAVKKFNENFKSSEYAFGIDVGTKDLALLCLIDKNKKPVNFDVYEICNENEICNEKLGFEKFGFYKDGTRRDEPYKLIKNPSYFLNESLYKKTFNATKEEFERSFSELFKRKSVCALDLTTAKVICGKIILNGDFSTHLNLKILNAKRKISAKLKKDPTLKIEYDNDDNILFGSNVIFYYNNKYEIVRPYDEIKNEIFEFHEKQRLDDARLEDNINKTRANLVANMVGVISFLHKEFSGFVVLENLKQSEIEGNHRLKFEGDITRPLELALYRKFQSKCLTPPISELIKLREGEKNENVESDLILQFGIIKFVDKDKTSRLCPACGKDAYENNNSKYKTDKKDGVFECAGCGFNNKNNAGDFAALDTNDKIATFNIAKRG

SEQ ID NO: 5 - protein, 1187 aa, Smithella sp.
  misc_feature: ShMmc3 effector
MVAIDRNKNNKIGGIIMENNYQITKTIRFKLEPENVSFNEYGIGRNDEFSLQSFVCMLNDYLGLCNEFLFYEKDGEFKIKDKLIIKNEWIRTFQRYEYVQLLAKKKATNNNDRRNNRRVQTTIGDIQNLTEKIEKVFDCVDEIYADLTKDASAQLNERAKRARTALLLKRLKAKQALPYLISLMENISDKNEDNNLSLRLKNAGLALQKQLDIAIQKYLPEQSGGLPIAKASFNYYTINKKPVDYSLIIKELENSLCFDLNDGKNILDSKIKEDVKNRLNGKKLLIGDAPMISIDDYVSLRQILKNIKSEQKKAFSEFMQIKPSLETLRTMKDLYLFNNISQDEFNEYYYLTQDIEDVSIEVNQCTNNEKKKLLKSKLQAFKKKRGALINAADNNTRNKFIDYKKFATFYRKIAQQHGRILAQLKGVEKEQVESQLLNYWAMILEDNNQYKLVLIPRERASECKQRVERNQITGSGKKLYWFESFTFRSLRKLCFGNVENGTDSNTFYPEIRKELSRKYYTEDKDGNRKFIKSEADFKGDDQKKIAFYKDVLNTNYAKQTLIFPKERVKKDIINSEFSTLEEFSIALEKICYNRFVTVSENMINNLSSYDSQIFDIKSLDLNNQLNTQNKDEKYLHNDKNHTRIWKYFWDNNNEINNFDVRLNPEITITYRTPKQSRIDKYGKDSQRFDSNKNNRYLHEQYTLVMTMSEHSNTPKKDLSFKAEKEFENEINNFNNNFNNKEVKFALGIDNGEVELSTLGVYLPIFSQGSKEMIIDELKKVNQYGFKTLTITDLSYKETDVNGKDKRIIVNPSYFLNKELYCRTFGKNKDDYKEMFEKLFAVKYLLTLDLTTAKVINGHIVTNGDIPTFFNLWLRHAQRYIYQMNDKAKDETAKKIILKKCNELNDLEKRKFIDFLNVGNKKYKELTDDEKNSYTQWIYQYWNGSNEENDDFNEVKRKQRVGNYSYDVLFAVCYIGEDIEKVIVIFDVRNIFKLRKDFYSIKSEKEIFEEIDKYNLNRTISDEELDLKMVTLKQALVANAVGVIDYLYKQYKDRFGGHGIIVKEGFDNGKVEQDREKFSGNIYRILERKLYQKFQNYGLVPPIKNLLSIRGKGLGDNEKNILQIGNVCFVSATRTSQQCPICEGKFAQNHGTICTSCGYNIENIMHSNDGIAGYNIAKRGFKNFLNNK

SEQ ID NO: 6 - protein, 1172 aa, Unknown
  Unknown bacterial species
  misc_feature: NoMmc3 effector
MNNIKTTKAIRFKLENSASNREIQERINNLSSNNGFDLVSFVTELDNYIDNLENYLFYKKGEYLYMKDKIILKKEWMKNYGKQELAEFKNKNNKPTKGARVQYKVGEYKVELKIQDAFDNIDEIYGELCDDASRELNERSKRTRTALLLKRLYAKNNLPLLVDFVENSISKKELGNDSLMLKSMGKRLMEHLELGIQEYLPEQSAGVSIAKASFNYYTINKKSIDYDTKIQEIERNLFVNNIDRIWNDRDNKIKDNDNVKADIASRQNNKPLCIGDSPFMDVDEYASLRQILKNILSEQKADFNKLMQQGGSYKELQNTDLYLFKDITKDEFDKYSELTEDIEELATKRNQTKNEQKKKELKSQIEILAKQRGSFISEADKTTEKMFKTYKAFSVLYKKIAQKHGKELAKLKGIEKEKAESQTLQYWAMILEKDNRHKLVLIPKAKANECRSRLVEADNANGNIKLYWFESFTYRSLQKLCFGNIENGSNTFYPQIRRDSMLSSKYSTRDRNGYYKFISGEYEFAGDEQRKIQFYQDVLRTDYAKKNLNLPNREVKEKIINSTFESLDDFKIALESICYRRAVCTNIHLIDALESEFGAQVFDITSLDLRREDNIKDKEEKYSYSYKSHTAVWKEFWTAENEKSNFDIRLNPEISIIYRKAKESRIEKYGADSKKNNRYLHDQLTLVTTLSEHCNSPERNIAFATIDDEKRIIAEFNSKLDKKNIRFAFGIDNGEVELSTLGVYLPQFKQDSIESSLKEVTNVDKYGFDTLTIRSLMYSEKDVNGRDRRIIDNPSYFLKEDLYCRTFGKNGDEYKAMFDKVFEQRRLLTLDLSTAKVICGRIVTNGDVISLYNLWMRHAQRNIYDMNEHIEGGGAKVYLKKSEVLNDNEKRKFLDYLNDGNEKYEKLSDADKKDYIDWIYQIWDGKEVENKRFAKVNRDQKRTGFYFHNVLLAASYIGEEVQDVKDIADIEDIRHVFKFREDFKQFKPENEMLDEINKYNIKVISNEELDLKLNQLKSSLVANVIGVIDYLYKQYKERFGGEGIIAKEGFGMSTVEGARMKFSGNIYRMLERKLYQKFQNYGMVPPIKNLTAFREDDHANKNNQYTQIGYICFIDYAGTSQRCPICDTKLAYNHGTECSAKCGFDSEGIMHSNDGIAGYNIAKKGFESITNN

SEQ ID NO: 7 - protein, 1269 aa, Porphyromonas sp.
  misc_feature: PcMmc3 effector
MENIKNEYQLSKTLRFGLTQKCKKRKKNYDGEIYKSHIELNDLVNISEKRIKESLPAADKESKLKLSDNIEKCLPLISNFLINWQQVYQRDDQIALDKDYYKILCKKIGFDGFWTETNSRTQQKIKKPQSRVIGLSELGKRHLGKERKQYILDYWKDNLLNAAEKYEIVNEKLKQFQEALRINRTDNKPNEVELRKSFLSLVHIVYDTLKPLCNGQILFPKLEKLNSNNRNDNQKLIEFATDHQSKSDLLSEVTEIKKYFEENGGNVPFCRATLNPNTAVKNPNSTDNRIEKEIEILGLSNILEEHKSVLFYDNYLEGLSVNSKKETLQSNDQNNLITKGLMFKYKPIPAIVQYEIAKTLSKKLGKSEEDVRNFLRGIGQAKSPAKDYADLQNKNDFNIEAYPLKVAFDFAWEGLARSIYHPDASFPLEQCRRFLNDNFGVNETDDNFQLYAKLQELRDYLAALEHNKLKDGTEQINAAREIIKSLDWQRIFSNRGNGYKESITIWLNKWKPNLQDNDDTDFKTAKQQIGLFRGGLKHRVKYYNKITQAYKNIAMPMGRTFAQMRDKITGAAELNKVSHYAMIIEDSNADKYILLQEFTENSDDRIYAKTNPTHSNGDITAYTVNSVTSGAIAKMLRKKRLENRGALRNPNPIEEWKTFIRNKDWDAEFQLNLNGNNLEKLIKEIDSKCYKLNKKYINKDTLVDLINKKNCLLLPIINQDLAKKEKSEINQFTKDWNAVFAENTPWRLTPEFRVSYRQPTPGYPISDIDDKRYSRFQMIGHFLCDYIPKSNNYISTKEQMAIYKDDKEQESAVKNFHEKLSVGIEAGKRNDTASEKPKEEFYVFGIDRGQKELATLCVIDHNKKIIGDFEIYVRSFNSDTKQWEHKFLEKRHILDLSNLRVETTLSIDGKPEKRKVLVDLSKVKVKDKNRNFTKPDKMQIKMQQLAYIRKLQFQMQTNPEGVLAWYEKNSTRELMLKNFVKKSDDDNNGLVSFYGAAVEKLENTLPIERISEMLQKFDLLKKKEKEGEDVKLQIDQLVQLDPVDNLKSGVVANMVGVIAFLLQQFKYQVYISLEDLSNPFSSQITGGITGVPLSVSKGEGRRVDVEKYAGLGLYNFFEMQLLKKLFRIQQNSETILHLVPAFRAQKNYDHEAVGKGKIKNQFGIVFFVDANATSKTCPVCGTTNKSPNKKEYPTARKGISQEGKEVWIERDKSGGNDIIRCFVCGFDTTKKYTENPLQYIKSGDDNAAYLISAEGIKAYELATTLTDNK

SEQ ID NO: 8 - protein, 1040 aa, Sulfuricurvum sp.
  misc_feature: Sf2Mmc3 effector
MENIKNEYQLSKTLRFGLTQKCKKRKKNYDGEIYKSHIELNDLVNISEKRIKESLPAADKESKLKLSDNIEKCLPLISNFLINWQQVYQRDDQIALDKDYYKILCKKIGFDGFWTETNSRTQQKIKKPQSRVIGLSELGKRHLGKERKQYILDYWKDNLLNAAEKYEIVNEKLKQFQEALRINRTDNKPNEVELRKSFLSLVHIVYDTLKPLCNGQILFPKLEKLNSNNRNDNQKLIEFATDHQSKSDLLSEVTEIKKYFEENGGNVPFCRATLNPNTAVKNPNSTDNRIEKEIEILGLSNILEEHKSVLFYDNYLEGLSVNSKKETLQSNDQNNLITKGLMFKYKPIPAIVQYEIAKTLSKKLGKSEEDVRNFLRGIGQAKSPAKDYADLQNKNDFNIEAYPLKVAFDFAWEGLARSIYHPDASFPLEQCRRFLNDNFGVNETDDNFQLYAKLQELRDYLAALEHNKLKDGTEQINAAREIIKSLDWQRIFSNRGNGYKESITIWLNKWKPNLQDNDDTDFKTAKQQIGLFRGGLKHRVKYYNKITQAYKNIAMPMGRTFAQMRDKITGAAELNKVSHYAMIIEDSNADKYILLQEFTENSDDRIYAKTNPTHSNGDITAYTVNSVTSGAIAKMLRKKRLENRGALRNPNPIEEWKTFIRNKDWDAEFQLNLNGNNLEKLIKEIDSKCYKLNKKYINKDTLVDLINKKNCLLLPIINQDLAKKEKSEINQFTKDWNAVFAENTPWRLTPEFRVSYRQPTPGYPISDIDDKRYSRFQMIGHFLCDYIPKSNNYISTKEQMAIYKDDKEQESAVKNFHEKLSVGIEAGKRNDTASEKPKEEFYVFGIDRGQKELATLCVIDHNKKIIGDFEIYVRSFNSDTKQWEHKFLEKRHILDLSNLRVETTLSIDGKPEKRKVLVDLSKVKVKDKNRNFTKPDKMQIKMQQLAYIRKLQFQMQTNPEGVLAWYEKNSTRELMLKNFVKKSDDDNNGLVSFYGAAVEKLENTLPIERISEMLQKFDLLKKKEKEGEDVKLQIDQLVQL

SEQ ID NO: 9 - protein, 1042 aa, Sulfuricurvum sp.
  misc_feature: Sf3Mmc3 effector
VQKKKKNYEGEIYESHNELNDLVRISEERIKQSLSIDKKSELQLSMPNVEKCLHLINNFLISWQQAYQRDDQIALDKDYYKILCKKIGFDGFWTEENRRTQQKIKKPQSRVISLSELKKSDELGKERIQYILDYWRDNLLNAAEKYELVSEKLKQFQEALKINRTDSKPNEVELRKSFLSLLHIVNDALMPLCYGQILFPKTEKLDSSKGHNQKLIEFATDHQSKSDLLSEITEIKKYFEENGGNVPFCRATLNPNTALKNPKSSDNKIEEEINILGLSNILNEHKSVLFYNKYLEDLPTKEKIKLLKNKNLNYITRSLMFKYKSVPAIVQYEIAKTLSTKNGKAEEDLRIFLRGIGRAKSPAKDYADLQDKNDFNIEAYPLKVAFDFAWEGLARSIYHSDMLFPLKQCSVFLEDNFGVKIDNKNFQLYAKLQEVNALLSTIEYGKPTDEQLLKKQVINLLCEIDWAAMKKNGQQNKLAIENWLKNKNNKSDFKTAKQQIGLIRGTLKNKITEYYNITQEYKDIAMQAGRIFAKMRDKITGAAELNKVSHYAMIIEDSNADKYVLLQEFTEKKDDRIYAKTEYNNRDIVTYSVNSVTSGAIAKMLRKKRLESLNDKYGESTFQQQELTKEQKEQQYIKEWKDFIEEKRWDLEFKLKIKGKDFEQLKKEIDSKCYELNKKYINREKLVDLINNKGCLLFPIINQDLAKKEKSETNQFTKDWNAVFAQNTPWRLTPEFRISYRKPTTNYPESDIGDKRYSRFQMIGHFLCDYIPKNDNYISTREQIAIYKDDKQQETAVSRFHDKLKARTEAEEHNDSINALIAKFGNVNKNKKSIIADKPKEEFYVFGIDRGQKELATLCVIDHNKKIIGDFDIYVRSFNSISKHWEHKFLEKRHILDLSNLRVETTLFIDGKPEKRKVLVDLSEVKVKDKKGNFTNPDKMQIKMQQLAYIRKLQFQMQTNPEVVLAWYEKNSTRELMLKNFVKKSDDDNNGLVSFYGAAVEKLENTLPIERISEMLQKFDLLKKKEKEGEDVKLQIDQLVQL

SEQ ID NO: 10 - protein, 1084 aa, Smithella sp.
  misc_feature: Smp3Mmc3 effector
MEKYKITKTIRFKLLPDKIQDISRQVAVLQNSTNAEKKNNLLRLIQRGQELPKLLNEYIRYSDNHKLKSNVTVHFRWLRLFTKDLFYNWKKDNTEKKIKISDVDYLSRVFEDFFNEWETVIERINTDCNRPEESKTRDAEIAFSIKKIATKQMFPFIKSFVYNSNYKNSEETKSKLTALLNEFETVLKICEQNYLPSQSAGIVIAKASFNYYTINKKQKDYKGYTDDIEKIEKGMNSKFHYERKYDQLLEELNLIALKELPLIEFYSKIKSYKSTRKIEFSEAVSKGLAFADLKSKFPLFQTESNKYAEFLELTGRITQISTAKSLLSKDNPEAQKLRDEIKKLRINRGEYFKNNFHKYISLCNLYKKIADKKGRLKGQVKGIENERIDSQRIQHWALVLEDNLKHSLILIPKEKVTEVYRKVRASKADSTSSSSSLYYFESMTYRALHKLCFGVNGNTFLPEIQKELPEYNPNKQSDFGEFCFHKSNTDKEIDEPKLISFYQSVLKTNYVKDNLNLPQSVFDEATVQTFETRQDFQIALEKCCYAKKTIISETLKKEILEDNNVQIFQITSLDLQRSEQKNLKAHTKIWNRFWTKQNETANYDLRLNPETAIVWRKPKKTRIDKYGAGTSLYDPKKRNRYLHEQYTLCTTVTDNALNNEITFAFEDTKKKGTEIVKYNEKINQTLKKEFNKNQLWFYGIDAGEIELATLALMNKDKEPQLFTVYELKKSDFFKHGYIYNKERELVIREKPYKAIQNLSYFLNEELYEKTFRDGKFQETFNELFKEKHVSAIDLTTAKVINGKIILNGDMITFLNLRILHAKRKIYEELIINPQAELKENEKEYYLYFDKEGTEKVEKIYRSRLDFEHIKPYQEIRNDLNAYFKNVQKNEAKVEDQINQTRRALVGNMIGVIYYLYQKYRGIISIEDLKQTKVESDRNKFEGNIERPLEWALYRKFQQEGYVPPISELIKLRELEKFPLKDVKQPKYENIQQFGIIKFVSPEETSTTCPSCEKKAYELQKEKKGEEKPAENKRYEADKKAGVFCCPKCGFHNRTNPMGYESLDSNDKVAAFNIAKRGFEQNFRQ

SEQ ID NO: 11 - protein, 1064 aa, Smithella sp.
  misc_feature: SmpMmc3 effector
MEKYKITKTIRFKLLPDKIQDISRQVAVLQNSTNAEKKNNLLRLVQRGQELPKLLNEYIRYSDNHKLKSNVTVHFRWLRLFTKDLFYNWKKDNTEKKIKISDVVYLSHVFEAFLKEWESTIERVNADCNKPEESKTRDAEIALSIRKLGIKHQLPFIKGFVDNSNDKNSEDTKSKLTALLSEFEAVLKICEQNYLPSQSSGIAIAKASFNYYTINKKQKDFEAEIVALKKQLHARYGNKKYDQLLRELNLIPLKELPLKELPLIEFYSEIKKRKSTKKSEFLEAVSNGLVFDDLKSKFPLFQTESNKYDEYLKLSNKITQKSTAKSLLSKDSPEAQKLQTEITKLKKNRGEYFKKAFGKYVQLCELYKEIAGKRGKLKGQIKGIENERIDSQRLQYWALVLEDNLKHSLILIPKEKTNELYRKVWGAKDDGASSSSSSTLYYFESMTYRALRKLCFGINGNTFLPEIQKELPQYNQKEFGEFCFHKSNDDKEIDEPKLISFYQSVLKTDFVKNTLALPQSVFNEVAIQSFETRQDFQIALEKCCYAKKQIISESLKKEILENYNTQIFKITSLDLQRSEQKNLKGHTRIWNRFWTKQNEEINYNLRLNPEIAIVWRKAKKTRIEKYGERSVLYEPEKRNRYLHEQYTLCTTVTDNALNNEITFAFEDTKKKGTEIVKYNEKINQTLKKEFNKNQLWFYGIDAGEIELATLALMNKDKEPQLFTVYELKKLDFFKHGYIYNKERELVIREKPYKAIQNLSYFLNEELYEKTFRDGKFNETYNELFKEKHVSAIDLTTAKVINGKIILNGDMITFLNLRILHAQRKIYEELIENPHAELKEKDYKLYFEIEGKDKDIYISRLDFEYIKPYQEISNYLFAYFASQQINEAREEEQINQTKRALAGNMIGVIYYLYQKYRGIISIEDLKQTKVESDRNKFEGNIERPLEWALYRKFQQEGYVPPISELIKLRELEKFPLKDVKQPKYENIQQFGIIKFVSPEETSTTCPKCLRRFKDYDKNKQEGFCKCQCGFDTRNDLKGFEGLNDPDKVAAFNIAKRGFEDLQKYK

SEQ ID NO: 12 - protein, 1217 aa, Smithella sp.
  misc_feature: Smp2Mmc3 effector
METILYQRTRSIRFKLEPIEAEEIEKEITVIKTQDNDGLVQDCIFLVNKGNELANKLSKLICRDYNCDEQNNISLKLRKDVDVKYVWLRLYTKNEYYDWSEPNNKTKIYSLAEIPYLSEKFVHWFASWKRDLAILNEQITKKTEEQHNLNRRADIGLIIQSLSKRNSFPFIKEFIAAMNPKNASKIEIEEIVKEIDELLNKCEKGFLPTQSSGYPIARASLNYYTIFKNPKDFDKEILELSGEKFCNDNQNECEILKAFFTHCFDVDGFCGMFLDVKKLENICSKLNSIKNYQENDKQLIAEAIDNKIKLLNEEKDNSKKKKAKKIIEQLENDKKIVCNFWELQENFYVQERNSSKNNNNKYCLNKNYFLIQQLCQSMKLFKAREKARFNEAVQNNKDLPYGQLNQFFLFSAIQIGNENDKRKTDNEVFDDFMKHNKELHDISDKISTLKQNKNLDEKNKKELDKICTQKDQIAKSRGKYFTDLDHNKTYFSNYVKFCNVYREVALKAGQLKARIKGIEKEKIESQRLKYWSVIIEENKKQYVAFIPKSNDYAKKAYENYSKIYTNDNSINTCQLHYFESLTHRALEKLCFSGVQERTNTFQPEIKKELSIEKFPNYYEKGYFIKGEYFFNDKKTGIKDESKLIQFYKDVLNTQYAKSALKGIPWEQLKKTVLDIQFENFDGFRQALEKFSYVKHIKTKKDLLNELSKEYDAQIFEITSLDLKRQIKEDANLKEHTKIWMEFWSENNQSNNYLIRINPQLTITWRDSKESREKKYGEETSLYDVNKNNRFLKPQYTISFTITENATTQTMNTAFKDAQTKKDQIHEFNKQLFQSYQPQYFFGIDVGNIELATLCIINPEKDLNEEKMSKESLQYFDVYKLKKDQYNFSKPYHFKTRNETRERKAIDNLSYFAIEENYKQTFNDDNFEACFSDLFEKPVNTCAIDLTTAKVLGDKIFLNGDIKTYLSLKERNARRKICQIIEKHPNAKLLINGNKIFFQESTSCERTCLCQEPIYYFNDKYDREVQTLADINNRLEDYIKDKDKSELIEESKINHLRAAIAANMTGVIYHLFEKYQSLIVLEYLTISDIASHKKGLKAFEGNITRPLQIALFRKFLKSSLVPPALSEIIQLREKAKDRITKIGIINFIDKTATSVSCPNCLGKFENYNDNKRKGFCLCPDCGFDTRTDLKGFEGLDGPDKVAAFNIAKRGFEDLQKHK

SEQ ID NO: 13 - protein, 1057 aa, Candidatus Roizmanbacteria
  misc_feature: CrpMmc3 effector
MEIQELKNLYEVKKTVRFELKPSKKKIFEGGDVIKLQKDFEKVQKFFLDIFVYKNEHTKLEFKKKREIKYTWLRTNTKNEFYNWRGKSDTGKNYALNKIGFLAEEILRWLNEWQELTKSLKDLTQREEHKQERKSDIAFVLRNFLKRQNLPFIKDFFNAVIDIQGKQGKESDDKIRKFREEIKEIEKNLNACSREYLPTQSNGVLLYKASFSYYTLNKTPKEYEDLKKEKESELSSVLLKEIYRRKRFNRTTNQKDTLFECTSDWLVKIKLGKDIYEWTLDEAYQKMKIWKANQKSNFIEAVAGDKLTHQNFRKQFPLFDASDEDFETFYRLTKALDKNPENAKKIAQKRGKFFNAPNETVQTKNYHELCELYKRIAVKRGKIIAEIKGIENEEVQSQLLTHWAVIAEERDKKFIVLIPRKNGGKLENHKNAHAFLQEKDRKEPNDIKVYHFKSLTLRSLEKLCFKEAKNTFAPEIKKETNPKIWFPTYKQEWNSTPERLIKFYKQVLQSNYAQTYLDLVDFGNLNTFLETHFTTLEEFESDLEKTCYTKVPVYFAKKELETFADEFEAEVFEITTRSISTESKRKENAHAEIWRDFWSRENEEENHITRLNPEVSVLYRDEIKEKSNTSRKNRKSNANNRFSDPRFTLATTITLNADKKKSNLAFKTVEDINIHIDNFNKKFSKNFSGEWVYGIDRGLKELATLNVVKFSDVKNVFGVSQPKEFAKIPIYKLRDEKAILKDENGLSLKNAKGEARKVIDNISDVLEEGKEPDSTLFEKREVSSIDLTRAKLIKGHIISNGDQKTYLKLKETSAKRRIFELFSTAKIDKSSQFHVRKTIELSGTKIYWLCEWQRQDSWRTEKVSLRNTLKGYLQNLDLKNRFENIETIEKINHLRDAITANMVGILSHLQNKLEMQGVIALENLDTVREQSNKKMIDEHFEQSNEHVSRRLEWALYCKFANTGEVPPQIKESIFLRDEFKVCQIGILNFIDVKGTSSNCPNCDQESRKTGSHFICNFQNNCIFSSKENRNLLEQNLHNSDDVAAFNIAKRGLEIVKV

SEQ ID NO: 14 - protein, 1067 aa, Omnitrophica WOR_2 bacterium
  misc_feature: ObpMmc3 effector
MKNGINLFKTKTTKTKGVDMEKYQITKTIRFKLLPDNAHEIVEKVKSLKTSNVDELMDEVKNVHLKGLELLFALKKYFYFDGNQCKSFKSTLEIKARWLRLYTPDQYYLKKSSKNSYQLKSLSYFKDVFNDWLFNWEESVSELAIIYEKYKICQHQRDSRADIALLIKKLSMKEYFPFISDLIDCVNDKNSNKTFLMKLSEELSVLLEKCNSRALPYQSNGIVVGKASLNYYTVSKSEKMLQNEYEDVCQSLDKNYDITEMKVILYKEKLDNLNFKDVTIANAYNLLKENKALQKRLFSEYVSQGKVLSLIKTELPLFSNINDNDFEKYKEWSNEIKKLADKKNTFCKKTQQDKIKDIQNKISELKKKRGALFQYKFTSFQKHCDNYKKVAVQYGKLKARKKAIEKDEIEANLLRYWSVILEQEDKHSLVLIPKNNAKDAKQYIETINTKGGKYIIHHLDSLTLRALNKLCFNAVDIEKGQMVRENTFYQGIKEEFERNKINCDNQGVLKIQGLYSFKTEGGQINEKEAVEFFKEVLKSNYAREVLNLPYDLESNIFQKEYTNLDQFRQDLEKCCYALHSKIGKDDLDEFTRRFEAQVFDITSIDLKSKKEKTKTTGEMKKHTQLWLEFWKGAIEQNFATRVNPELSIFWRAPKSSREKKYGKGSDLYDPNKNNRYLYEQYTLALTITENAGSHFKDIAFKDTSKIKEAIKEFNMSLSQSKYCFGIDRGNAELVSLCLIKNEKDFPFEKFPVYRLRDLTYQGDFKDKHDQMRYGVAIKNISYFIDQEDLFEKNNLSAIDMTTAKLIKNKIVLNGDVLTYLKLKEETAKHKLTQFFQGSSINKNSRVYFDEDENVFKITTNRNHNPEEIIYFYRGEYGAIKNKNDLEDILNEYLCKMETGESEIVLLNRVNHLRDAISANIVGILSYLIDLFPETIVALENLAKGTIDRHVSQSYENITRRFEWALYRKLLNKQLAPPELKENILLREGDDKIDQFGIIHFVEEKNTSKDCPNCRKTTQQTNDNKFKEKKFVCKSCGFDTSKDRKGMDSLNSPDTVAAYNVARKKFES

SEQ ID NO: 15 - protein, 1232 aa, Sulfuricurvum sp.
  misc_feature: SfpMmc3 effector
MLHAFTNQYQLSKTLRFGATLKEDEKKCKSHEELKGFVDISYENMKSSATIAESLNENELVKKCERCYSEIVKFHNAWEKIYYRTDQIAVYKDFYRQLSRKARFDAGKQNSQLITLASLCGMYQGAKLSRYITNYWKDNITRQKSFLKDFSQQLHQYTRALEKSDKAHTKPNLINFNKTFMVLANLVNEIVIPLSNGAISFPNISKLEDGEESHLIEFALNDYSQLSELIGELKDAIATNGGYTPFAKVTLNHYTAEQKPHVFKNDIDAKIRELKLIGLVETLKGKSSEQIEEYFSNLDKFSTYNDRNQSVIVRTQCFKYKPIPFLVKHQLAKYISEPNGWDEDAVAKVLDAVGAIRSPAHDYANNQEGFDLNHYPIKVAFDYAWEQLANSLYTTVTFPQEMCEKYLNSIYGCEVSKEPVFKFYADLLYIRKNLAVLEHKNNLPSNQEEFICKINNTFENIVLPYKISQFETYKKDILAWINDGHDHKKYTDAKQQLGFIRGGLKGRIKAEEVSQKDKYGKIKSYYENPYTKLTNEFKQISSTYGKTFAELRDKFKEKNEITKITHFGIIIEDKNRDRYLLASELKHEQINHVSTILNKLDKSSEFITYQVKSLTSKTLIKLIKNHTTKKGAISPYADFHTSKTGFNKNEIEKNWDNYKREQVLVEYVKDCLTDSTMAKNQNWAEFGWNFEKCNSYEDIEHEIDQKSYLLQSDTISKQSIASLVEGGCLLLPIINQDITSKERKDKNQFSKDWNHIFEGSKEFRLHPEFAVSYRTPIEGYPVQKRYGRLQFVCAFNAHIVPQNGEFINLKKQIENFNDEDVQKRNVTEFNKKVNHALSDKEYVVIGIDRGLKQLATLCVLDKRGKILGDFEIYKKEFVRAEKRSESHWEHTQAETRHILDLSNLRVETTIEGKKVLVDQSLTLVKKNRDTPDEEATEENKQKIKLKQLSYIRKLQHKMQTNEQDVLDLINNEPSDEEFKKRIEGLISSFGEGQKYADLPINTMREMISDLQGVIARGNNQTEKNKIIELDAADNLKQGIVANMIGIVNYIFAKYSYKAYISLEDLSRAYGGAKSGYDGRYLPSTSQDEDVDFKEQQNQMLAGLGTYQFFEMQLLKKLQKIQSDNTVLRFVPAFRSADNYRNILRLEETKYKSKPFGVVHFIDPKFTSKKCPVCSKTNVYRDKDDILVCKECGFRSDSQLKERENNIHYIHNGDDNGAYHIALKSVENLIQMK

SEQ ID NO: 16 - protein, 1177 aa, Unknown
  Unknown bacterial species
  misc_feature: No2Mmc3 effector
MLTKLGDLFMKQIKTTKAIRFKLENDDKNTIINNSITNLNSRRNFDLNLFVDDLDTFITDCNDYLFCFKKKGCREIFYVNPNLIVKNEWLKKYAKQDFAKLKQNHTAQRIQYKIGDIDGLNLRIQDLIDDIDDIYTKLCDDASAELHERAKRAHTALLLKRLSANNSLPCLVSLINNIVDKNEKDNLSLKLKSSGKKLLSQLEIGLQEYLPEQSSGVAIAKASFNYYTINKKPIDYDRKIEELSQNMSTSLDEWKKKWQFNKGLWELIEIKSEGKTLYLGDSPFSDDGEYASLRLILKNILAEQKARFSEMMQDNVSYEELKDSDLFLFNNISEDEYDEYLDLTNQIEELATEINQEDDECKKKDLRSDLMKLKKERGSLINAADKKTKDRFKTYKTFADFYRKVSQKHGRVLAKLKGIEKERTESQLLQYWALILEVNNQHKLVLIPKEKAQEFKSRLTKSNDKKSTIKLYWFESFTFRSLQKLCFGNIENGSNTFYPRIKKELQYKYSTTDRNGYPQFIAGEFEFKGDEQKKIQFYKDVLNTKYAQSALSFPVNEVKRNIIDKDFETLDDFIIALEQICYQRYVSVNPHLINALSENFNAQILDITSLDLRNESNVKDKDVAYSHDDKIHTKIWRQFWSVDNEKNGFDVRLNPEITITYRKPKESRVIKYGNDSELYDANKKNRYLHDQLTLVTTISEHSNSPAKNLSFTTESELKDMIERFNSEIKKEKIKFAFGIDNGEVELSTLGVYLPDFKQDSNEATFAELKKVDKYGFKVLEIKNLLYSEKDYNGKERKIIQNPSYFLNKELYCRTFNKTESEYEKMFENVFEEKHLLTLDLSTAKVINGHIVTNGDVVSLFNLWMRHAQRNIYELNDHADKETSKELILKKSEDLNQCERRKLIDYLNKNNNKYDDLSENEKSDYIEWVYKIWNGEHSEYGKNKRFADISKGQRVGDYLNNVLMAVVHEKGQIESVIDIFDIRHVFKFRKDFYSLKSEKEMLDAINRYNVKNISDEELDLKYNDIKKALVANVVGVVDFLYKQYKSRFGGEGIVVKEGFDSSKVESDREKFSGNIYRFLERKLYQKFQNYGLVPPIKNLMLIRDARLNHANDFMRLGNICFVGFEGTSQNCPVCEKGRLRHGETCSNNCGFESKGIMHSNDGIAGYNIAKRGFNNFNE

SEQ ID NO: 17 - protein, 1290 aa, Sulfuricurvum sp.
  misc_feature: Sv2Mmc3 effector
MKKNENKYQLSKTLRFGLTLKEKISNNEKTPYQSHSQFRDLIILSENRIREGISTPQNRDLPSFIHRIQNCTDFINDFIHDWWMILMHTGQIELDKDYYKSLTKKVGFVGFWYKENKKKGGKTKQPQARNIPMGELRHLCPQNTKECATYITDYWKDLLITAANKLHESSEQQKKFIKAMEQNRTDNKPNEIDLKKSFLSLVSVTMELLNPILNGQILFNKMDRLDMSKKSDNDFIDFVNDHETVRELNNDIEEIIADFKENGNNVNYCKATLNQDTALKQHNNNIPNDIATDLEELMIDSIVGNYDDVNSFMDNCVSNLSAKEKIRIIKDSNISLIYRAILFKYKMIPANVRRDIAQGMAKKLNKDEENIYSFLCEFGTLRTPQKDYADLKDKDSFNLDNYPLKVAFDFAWEGLAKAQHHDQSDFPFDLCRNFLQENFDVNLEENQDFLLYADLIELNALLSTLDKGNPADPDSIKEKVLDMVEHIKWNSLLNPQKVNEYKKKVTYYKNIIKNRLNFSKGNETYERIKKEIAMSRGSLKNKIEKYDDLTSQYKSIAIDLGKKFASLRDKIIGANEDNKVTHYAMILEDSNCDKYLLLQKVSNNEDDIYHYMSYDSSDPKTYYVDSVTSSAIAKMIRKETYQSKKNQSKIKEYAKLEEKERERRYVEDWCRFIRRKKYDNRYNLNINNGLSFEALKKEIDSKSYILVKKNISVDSIRELVENEGCLLFPIVNKDLTKERKTEDNQFTKDWNMIFSGSETNWRLTPEFRVTYRNPVPGYPNDKFGSKRYSRFQMNAHFVCDFIPSSNSYTSNREQIAIFKDENEQKKRVEEFNRTLSNINQKFYVIGIDRGQKELATLCVVDQDKKIHGDFKIYSRKFNSERKQWEHYSLEGEKGTRNILDLSNLRVETTIMIDGKPERRQVLVDLSEVLVKDKDGNYTKPNKMQIKMQQMAYVRKLQFQMQANPTEVLEWYEQNPTEELIIKNLVDKENGEKGLISFYGAALVELDQTLPVSKIKEMLEEFKILKQRESKKENVQKELNSLTQLEAVDSLKAGIVANMVGVISYILKTLDYNAYISLEDLSKAQSSPEFASGISGAITKMSREEGRRIDVEKYAGLGLYNFFEMQLLRKLHRIQTDSGNILHLVPAFRAQKNYDHIMVGKEKIKNQFGIVFFVDAAATSIKCPRCGAVNKEDFHPNKQKYPDAEKGPKLRNGKEQSGQKGVWVTRDKEDDDRIKCYCCGFDTKEKNEGNPFMYIKSGDDNAAYLISDLGVESYRKAYELAATVVEDRKKH

SEQ ID NO: 18 - protein, 447 aa, Unknown
  Unknown bacterial species
  misc_feature: Bd2Mmc3 effector
MKYQLTKTLRFGLTKVRKVKKHQSHEELDDLVMLSEYNIIRNNMNSLMKFQDGVNTISESDKNARLKKFDEDFDRIIKIKDIKQRNQEYTEFLNKFFTEDSPVCLLNPEKTLFEQIESVYLDIEGYIKDWESICTKTHLISISKDYYKNLSKRAFYEVDKKISTPEIAMSSLRSKNNYGLIVGNAISEYWQKTISKANSLFNDFFKIEYYKMKNALANKTLSHTKINLVDFRKAFLSLCSLIDDSLTSIVNGSILIHRSSKDDEQYVNDFITNESINNRFKLFDKIREIRGLIKTEGGNTLLGRATFNPYTALQKPNLFSEKLRVSKEDSKEEQKKKNDLNKFLGQLQQLLNNEDFKGKSNIELYKQLFGADTDKKEKLTDSQLSAVQRAQYFKFKQIPASVRFILADYLSDKYGYNFAEISALFRQIGVPITPAEDYKQLKETRRW

SEQ ID NO: 19 - protein, 419 aa, Unknown
  Unknown bacterial species
  misc_feature: Bd3Mmc3 effector
CLVDLSESKVWVDSLDHNKGQRENNQITKLKELYYTRQFVYHLQSKADDIQKEVLRLKQEKDAFASQNTKDTFSFKSELIIPFKCGNAFEYYPFDAIKEITEKYNELKNEGKQDEIRKFYELDASREIKKGIVANMIGVVTYIFKEICHSNARIVLENLCTAWKIQNDALTGAKLDSTPMNYLVDFKDQENSRLAGVGTYSMFEIQLLKKIFKLQVEENKDFVPAFRSVEDYEKTIKKLRKKKNSNKPAMDSFGIVGFVSPMNTSHKCPICGASGNSNIIRHKESGDELECKKCGYYSIPSKIQEKSLFTNGKFVNNEIDDFYNESNLIMIESGDDNAAYQIAVKALKNINNDFFKKIQSLQKSLNKDLDNDEVEPDVEEEVEKVQEKTTPSTNKPKNNWRPNKGFNNNRNKNYNNKRN

SEQ ID NO: 20 - protein, 931 aa, Candidatus Roizmanbacteria
  misc_feature: Rz2Mmc3 effector
ENGIIDNNKKYYLTNIDYLPKEFSRWKKEWQELTEQLEKLTNTEEHQQERKSNIAFVLRRFLKRQNFDFIKEFIFAIKDLQNQKGIEGDKELRDLKILLENTSKNLKACEKEYLPLQSLGPMLHKASLNYYTLNKTPKEYEKLVIDCKYKLKIKKLRFFLDKKFNFGENPLNCTLDEAYYKIKDWKAEQKAKFNEAVAGNRLTVSNFKEKFPLFDASDENFLKFCNFTKELDNHPKNAKEIAQRRGSFFNKPREAVQTENYLEFCELYKRIAMERGKILAKIKGIENEETQSQLLDHWAVILKEDKKHSVIMIPRGADENHKSAHEFIGKNFSKDGNGEITLYHFKSLTLRALEKLCFKKLENTFFREVQKEGVKFPQYKEYLRKQECAIDLIEFYKEILQSNYAKKYLDLVDFGGLQSFLDAEFTGVEEFESALEKACYVKIPFRISAEQKEKFILDFDAKVFEMTTRSIAGGKKENEHARIWKEFWSEENQDKSHITRLNPEMNIFYRKALDEREGNRNRYAAERYTLATTIALNATRKKSHLAFKTTEDVKTYIDEFNAEFSKNFTGEWIYGIDRGLKELATLCITRFSDDKNKFGVAQAKEFAEIEVWELKNEYKDDCLKDEEGNILKNAKGENRKIIDNVSCLDDIDEIFFDKKIVSCIDLTMAKLIKGKIVINGDKKTYLKLKELSAKRRIFELFSTAKIKEDSEIKYKAGGTLRILQEPVYWYTEEEKNTPDQKEILKNMVEAYMKELHQKDKLEDIEKINHLRDAITANMVGIIAHLEQRFSGIIALEDLDEKKGGLRTIDEHFNQSNQVISRRLEWSLYRKLANNGVVPPQIKQSILLRDDFRAYQFGILKFVEVENTSKRCPKCGNIFKKIKGHYICEKENCFSSKENRCILEKNLNNSDEVAAYNIAKNAFDMTLKATEK

SEQ ID NO: 21 - protein, 470 aa, Candidatus Roizmanbacteria
  misc_feature: Rz3Mmc3 effector
AQPSSLYDARKFEQNRYCKPQYTMVTTFTDNAHGKKFDFSFTDTASIKKAIDDFNSNYEKASTAQWYYGIDRGEKELATLCIGKFSANDNQVQCEFPAEIELYKLKPEKFFYSNSFDEDQPKLKLDLKKGKYASERKTGQDDKGHGGPIKNLSYHLNKLEDERWFEPTSGKEAACIDLTTAKVIKGNIILNGDYMTLLALRLAWAKRQVFELFHDGKIDHKSEVKRRSKKSDFLGVFCNGGFIKSDRSDDEAKHGLVLYRFTTEQKSQAEKSIPPVIDELNKYLKGLDVSSRSKNEPPIDKINHLRDALTANIIGVLKHLNTIYPARVIALENLDEYKGTNKFIEDQLIKSETMLLRRLEWSLYRSFQAAGLVPPGIKETILLKDEFKKTQFGIIKFIETKGTSSNCPVCDNEHKKTDTHYICEKVECGFSSKDNQKGLVALSNSDKVAAYNIAQRGFKSFTAVATQKKS

SEQ ID NO: 22 - protein, 209 aa, Candidatus Roizmanbacteria
  misc_feature: RzMmc3 effector
MKNFEELKYEQRKTIRFNLQQKEIKRAYTPVDTSNNLSGQIKDFTKKYESIIEGLEKLIFFAKSEKNEEKSLKKKVYIKHTWLRNYTKTEFYNFDKNGRKRGNQTSISDSNLNFLKEYFENWISENRECVENIQSFFNQPEEEQKRISEFAYWIQKISKRSNFEAIFELFNGNIQHKDNDEKIINNKKTLEECKPLLKTLEKELLPSQS

SEQ ID NO: 23 - protein, 1258 aa, Sulfuricurvum sp.
  misc_feature: Sf4Mmc3 effector
MHKNRILTKQIITMENKYQITKTIRFGLTLKQQGKKHQTHQVLLDLLNRSQLKIEETVRKDSNKTEQDFVRNVRDCYNQMKTYLNGWQQVYERADQISLTKDYYKIIARKANFDGFWTISRFNKRKNGQEEVKQPQTQLIKVSSLTTKYFDKPRKDYIVDYWRENLSTARRLCNEFKLLLEQYETALHNDDKAHTKPHLVDFRKMFLSLCNRVSDTLVPLVNGSITFDGIDKLADEERNKTVKEFAAPEQRDERQALLQLIEEIRAYFESNGNNVPFGRVTLNKYTAQQKPQNYTDEIKKIIRDLQLNALVKDLQNEENIEDYFQGQDKFTVLKDENRSNVERAQMFKCKPIPVSVRTPLLEFLSKHYDIDKAKAEKVLCEIGTPVSPAYDYSKLSEAEKKDFSLEKYPIKLAFDYAWENLAREIMNHGVDFPKDEAERYLKTHFGVTEATDALQLYARLLFVKEKISALFNEENQAANNKKEIDPERKKTLIDEIDNTFREINYPYKQKEYEDYEADILDWLDKSKSERKNLRKNNDELYKSYEKAQQKMGLLRGEQKSKILKYRDLTNEFKKIAINFGKSFAGLRDKFREENEINKITYCGIIVEDEKADRYLLLQPINDKNDTAKQNVTKIYETESDGLTTYQVKSLTSKTLNKMIKNAGGYRDFHSCEMRINSYKAKTDWANYQDNPSFVEALKEMLASSRMARQQNWSEFSWDFSECKTYDAIAKEVDKKSYVLQKGKISIEKITDLVNNGGCLLLPIVNQDITSETRVLKNQFSKDWQMIFDENLKEYRLHPEFAITYRQPTPDYPQPGEKRYSRFQMIGGFQCEIVPQSDDFISKKEQIEVFNDKKAQEQKVSDFNGKINLGNDYFVIGIDRGIKQLATLCVLNGKGEIQGDFEIYTRTFDDVKKQWIHSLSYKTGILDLSNMRVETTVEGKKVLVDLSAIKTKDENGNYTKENLQTVKLKQLAYIRKLQYKMQYDEKSVLDFVEKHKAEEEIQSHISELISPYKEGERFADLPMAQIKDMLEQFKTLCEEKRDKEKRELCELDAADHLKSGIVANMVGVVAYLVEKYDYKVYVSLENLCRAYRFATDGLNGQTLPSTSQDPEVNFMEQENLVLAGVGTYRFFEMQLLKKLFKMQQDEKIINLVPAFRSVDNYEKLVKCDKENGDKYVNYPFGIVRFVDPKNTSHRCPNCGSTKVSRRNNVITCNDCGFSTANHSTGTSHLKFITNGDDNGAYHIAKKTFENLQNKNGTPD

SEQ ID NO: 24 - protein, 1297 aa, Sulfuricurvum sp.
  misc_feature: Sv3Mmc3 effector
MGKNENKYQLSKTLRFGLTLKEKISNNEKTPYQSHSQFRDLIILSENRIREGISTPQNRDLPSFIHRIQNCTDFINDFIHDWWMILMHTGQIELDKDYYKSLTKKVGFVGFWYKENKKKGGKTKQPQARNIPMGELRHLCPQNTKECATYITDYWKDLLITATNKLYESSEQQKKFIKAMEQNRTDNKPNEIDLKKSFLSLVSVTMELLNPILNGQILFNKMDRLDMSKKSDNDFIDFVNDHETVRELNNDIEEIIADFKENGNNVNYCKATLNPDTALKQHNNNIPNDIATDLEELMMDSIVGNYDDVNSFMDNYVSNLSAKDKIKKIKDSNISLIYRAILFKYKMIPANVRRDIAQGMAKKLNKDEENIYSFLCEFGTLRTPQKDYADLKDKDSFNLDNYPLKVAFDFAWEGLAKAWYHDQSDFPIDPCRDFLQENFDVNLEEDQEDEYFLLYADLIELNALLSTLDKGNPADPDSIKNEALEMVEYINWNSLDKKNGNYYKKIIKNRLKSSKGNETYERIKKEISMSRGRLKNKIEKYDDLTSQYKRIAMDLGKKFASLRDKIIAANEDNKVTHYAMILEDSNCDKYLLLQKVSNNIYHCMSYDSSDPKAYYVDSITSSAIAKMIRKETNPSKIREYAELEEKERERRNVDDWCRFISKKEYDRRYQLNINNGLSFEALKKEIDSKSYILVKKNISVDSIRELVENEGCLLFPIVNKDLTKERKTTEDNQFTKDWNMIFSGSETNWRLTPEFRVTYRNPVPGYPNDKFGSKRYSRFQMNAHFVCDFIPSSNSYTSNREQIAIFKDEGEQKKRVEEFNRTLSNINQKFYVIGIDRGQKELATLCVVDQDKKIHGDFKIYTRKFNSERKQWEHYSLEGEKGTRNILDLSNLRVETTIIIDGKPERRQVLVDLSEVLVKDKEGNYTKPNKMQIKMQQMAYVRKLQFQMQANPTEVLEWYEQNPTEELIIKNLVDKENGEKGLISFYGTALVELDQTLPVSKIKEMLEEFKILKQRESKKENVQKELNNLTQLEAVDSLKAGIVANMVGVISYILKTLDYNAYISLEDLSTVQSSTEFASGISGAITKMSREEGRRIDVEKYAGLGLYNFFEMQLLRKLHRIQTDNGNILHLVPAFRAQKNYDHIMVGKEKIKNQFGIVFFVDAAATSIKCPRCGAVNEDKFNPDKQKYPDAEKGPKLRNRKEQSGKKVWVTRDKEDDDRIKCYCCGFDTKEKNEGNPFMYIKSGDDNAAYLISDLGVESYRKAYELAATVVEDRKKTLTNNLNQSNYKIRFLWHTMY

SEQ ID NO: 25 - protein, 1291 aa, Sulfuricurvum sp.
  misc_feature: Sf8Mmc3 effector
MENIKNGYQLSKTLRFGLTQKCKKRRKNYEGEIYESHKELNDLIMFSEERIKQSLSIDKKSELQFSINNIEKCLLLVDNFFFSWQQVYQRDDQIALDKDYYKILCKKIGFNGFWTEKRRTQQKIKKPQSRVISLSELKKSDELGKERIQYILDYWRDNLLNAAEKYELVSEKLKQFQEALKINRTDSKPNEVELRKSFLSLLHIVNDALMPLCYGQILFPKTEKLDSSKGHNQKLIEFATDHQSKSDLLSEITEIKKYFEENGGNVPFCRATLNPNTALKNPKSSDNKIEEEINILGLSNILNEHKSVLFYNKYLEDLPTKEKIKLLKNKNLNYITRSLMFKYKSVPAIVQYEIAKTLSTKNGKAEEDLRIFLRGIGRAKSPAKDYADLQDKNDFNIEAYPLKVAFDFAWEGLARSIYHSDMLFPLKQCSVFLEDNFGVKIDNKNFQLYAKLQEVNALLSTIEYGKPTDEQLLKKQVINLLCEIDWAAMKKNGQQNKLAIENWLKNKNNKSDFKTAKQQIGLIRGTLKNKITEYYNITQEYKDIAMQAGRIFAKMRDKITGAAELNKVSHYAMIIEDSNADKYVLLQEFTEKKDDRIYAKTEYNNRDIVTYSVNSVTSGAIAKMLRKKRLESLNDKYGESTFQQQELTKEQKEQQYIKEWKDFIEEKRWDLEFKLKIKGKDFEQLKKEIDSKCYELNKKYINREKLVDLINNKGCLLFPIINQDLAKKEKSETNQFTKDWNAVFAQNTPWRLTPEFRISYRKPTTNYPESDIGDKRYSRFQMIGHFLCDYIPKNDNYISTREQIAIYKDDKQQETAVSRFHDKLKARTEAEEHNDSINALIAKFGNVNKNKKSIIADKPKEEFYVFGIDRGQKELATLCVIDHNKKIIGDFEIYVRSFNSDTKQWEHKFLEKRHILDLSNLRVETTLSIDGKPEKRKVLVDLSKVKVKDKNRNFTKPDKMQIKMQQLAYIRKLQFQMQTNPEVVLAWYEKNSTRELMLKNFVKKSDDDNNGLVSFYGAAVEKLENTLPIERISEMLQKFDLLKKKEKEGEDVKLQIDQLVQLDPVDNLKSGVVANMVGVIAFLLQQFKYQVYISLEDLSNPFSSQITGGITGVPLSVSKGDGRRVDVEKYAGLGLYNFFEMQLLKKLFRIQQNNETILHLVPAFRAQKNYDHEAVGKGKIKNQFGIVFFVDANATSKTCPVCGTTNKSPNKKEYPTARKGISQEGKEVWIERDKSGGNDIIRCFVCGFDTTKKYTENPLQYIKSGDDNAAYLISAKGIKAYELATTLTDNK

SEQ ID NO: 26 - protein, 1180 aa, Unknown
  Unknown bacterial species
  misc_feature: No3Mmc3 effector
METIRYNRFIRFKLQSDKTNTLIEEKIASLSNSDNKEFDLVNFFSNLGDYLSDFYDYIFSEKEDQGTIVKGYMSVKNDWIKSYARQAYAGFVESEKTNKETKRQRVQHTLKDFEKYGLSERIINAYNDVVDVLDKLDDVVSRDKHERMDRAQTSLLLGRLKIKGALPLLVSLVDSVSDKKEEGDFSLILKQKGKELLEQLELGILSFLPEQSKGYPIAKASFNFYTINKKPIDYTEKIETINKKLKVDFSELKELKWKGSKELWSKIKTDIEQRSKGKELLLGEMPMRDISEYANLRQILKNILSKQKAKFSELMQKEDSCYSDLQESELYLFDNISEDEFDEYFELTKQIETIATKRNKTHDTAQKKQLRTKLNNLKKERGNLISAACRDTRDMFKAYKEVAEFYRKVAQNHGRFYAQLKAMEKERNESQMVNYWALILQNENKHKLVLIPRNQASDFKIRLKESEDRTSKIKLFWFESFSFRSLQKLCFSNIESGANKFYSDLEKEYELKKKYSFDGKFITGEFQLQGDEQRKIEFYKDVLRSRVASKMLSISREELKDEVLDVDFDSLNDFKVALERVSYKRMFMTKTWILEDLVSDKFNAQVFDITSIDLRHDESCSGKERLYDYTDKLHTQIWKEFWSEENENNNFDIRLCPEITLMYRKPKPSRIVKYGEGSTQRNRYLHEQLTLVTRFTERSNSSGRELAFLAKEQEKKIVEDFNKKVLKENMRFALGIDNGEVELSTLGVYIPEFGQGTNEQKLDMLSDVEKYGFPTLTIKDLKYKETDIKGIDRYVVKNPSYFIKEDLYCRTFNRNHEDYEKMFAELFKSENLLSLDLSTAKMINGHIVTNGDVVSLFNLWKRHAQRNIYDMNEHQKAEGDREVKLKRSNELSVVERRKFIDYLNTGDNKNQKYEKLSEEQKSEYVDWIYNCWNGNEKKNDVFEDVYKKCKRKGNFADIVLYAVCSNSKEVEKVVDVFDIRNIFKFRKDFDCLMSEDKIRAELDQYNVRSSISDEELDLNLKQTKSSLVANVIGVIDFLYNDYKNRFGGDGIIVSEGFGVNKVESDLEKFSGNIYRMLERRLYQKFQSRGLVPPIKNILLFRENDNNVNRNIPFLQIGNICFVDPMGTSQKCPICENNVLNHTESCSKCGFKSKGIMHSNDGIAGYNIAKRGYIEFLKMKN

SEQ ID NO: 27 - DNA, 38 bp, Artificial Sequence
  Synthetic
  misc_feature: consensus repeat sequence of Mmc3 CRISPR systems
tgtctatacagacagattaaatttctactattgtagat

SEQ ID NO: 28 - DNA, 36 bp, Unknown
  Unknown bacterial species
  misc_feature: BdMmc3 CRISPR repeat sequence
ggctaacggcctttttaaatttctactattgtagat

SEQ ID NO: 29 - DNA, 36 bp, Sulfuricurvum sp.
  misc_feature: SfMmc3_ CRISPR repeat sequence
gtctataaagaccaaataatttctactattgtagat

SEQ ID NO: 30 - DNA, 36 bp, Sulfuricurvum sp.
  misc_feature: SvMmc3_ CRISPR repeat sequence
ctctatagagagcattagatttctactgttgtagat

SEQ ID NO: 31 - DNA, 36 bp, Unknown
  Unknown bacterial species
  misc_feature: NapMmc3_ CRISPR repeat sequence
gtctagaccacaaatttaatttctactattgtagat

SEQ ID NO: 32 - DNA, 36 bp, Smithella sp.
  misc_feature: ShMmc3_ CRISPR repeat sequence
gtctataaagacaaaataatttctactattgtagat

SEQ ID NO: 33 - DNA, 37 bp, Unknown
  Unknown bacterial species
  misc_feature: NoMmc3_ CRISPR repeat sequence
tgtctataaagacgttttaatttctactattgtagat

SEQ ID NO: 34 - DNA, 36 bp, Unknown
  Unknown bacterial species
  misc_feature: No2Mmc3_ CRISPR repeat sequence
gtctataaagacaatcgaatttctactattgtagat

SEQ ID NO: 35 - DNA, 36 bp, Sulfuricurvum sp.; identical to SEQ ID NO: 30
  misc_feature: Sv2Mmc3_ CRISPR repeat sequence

SEQ ID NO: 36 - DNA, 36 bp, Candidatus Roizmanbacteria
  misc_feature: Rz2Mmc3_ CRISPR repeat sequence
gtttaatcctcctataaaatttctacttttgtagat

SEQ ID NO: 37 - DNA, 36 bp, Sulfuricurvum sp.
  misc_feature: Sv3Mmc3_ CRISPR repeat sequence
ctctatagagagtattagatttctactgttgtagat

SEQ ID NO: 38 - DNA, 36 bp, Smithella sp.
  misc_feature: Sf4Mmc3_ CRISPR repeat sequence
gtctaaatgactgaatcaatttctactattgtagat

SEQ ID NO: 39 - DNA, 36 bp, Smithella sp.
  misc_feature: SmpMmc3_ CRISPR repeat sequence
gtccaaaggacggattaaatttctactattgtagat

SEQ ID NO: 40 - DNA, 36 bp, Smithella sp.
  misc_feature: Smp2Mmc3_ CRISRP repeat sequence
  misc_feature: Smp2Mmc3_ CRISPR repeat sequence
gtctgacagacagattgaatttctactattgtagat

SEQ ID NO: 41 - DNA, 36 bp, Candidatus Roizmanbacteria
  misc_feature: CrpMmc3_ CRISPR repeat sequence
ctctacaactgataaagaatttctacttttgtagat

SEQ ID NO: 42 - DNA, 36 bp, Omnitrophica WOR_2 bacterium
  misc_feature: ObpMmc3_ CRISPR repeat sequence
atcgaacagactcataaaatttctactgttgtagat

SEQ ID NO: 43 - DNA, 36 bp, Sulfuricurvum sp.
  misc_feature: SfpMmc3_ CRISPR repeat sequence
gtctaaaccgacccaataatttctactgttgtagat

SEQ ID NO: 44 - DNA, 17 bp, Artificial Sequence
  Synthetic
  misc_feature: Consensus sequence 18 nt processed repeat sequence of Mmc3 systems
atttctactdttgtagt

SEQ ID NO: 45 - DNA, 18 bp, Artificial Sequence
  Synthetic
  misc_feature: 18 nt processed_CRISPR repeat of BdMmc3, NapMmc3, NoMmc3, SfMmc3, ShMmc3, SmpMmc3, and Smp2Mmc3 systems
atttctactattgtagat

SEQ ID NO: 46 - DNA, 19 bp, Artificial Sequence
  Synthetic
  misc_feature: 19 nt_CRISPR repeat of BdMmc3, NapMmc3, NoMmc3, SfMmc3, ShMmc3, SmpMmc3, and Smp2Mmc3 systems
aatttctactattgtagat

SEQ ID NO: 47 - RNA, 35 nt, Artificial Sequence
  Synthetic
  misc_feature: processed_CRISPR RNA of BdMmc3 system
  misc_feature (19)..(35): n is a, c, g, or u
auuucuacuauuguagaunnnnnnnnnnnnnnnnn

SEQ ID NO: 48 - DNA, 18 bp, Artificial Sequence
  Synthetic
  misc_feature: processed_CRISPR repeat of SvMmc3, Sfp Mmc3, ObpMmc3 systems
atttctactgttgtagat

SEQ ID NO: 49 - DNA, 18 bp, Artificial Sequence
  Synthetic
  misc_feature: processed_18 nt CRISPR RNA of SvMmc3 system
atttctactgttgtagat

SEQ ID NO: 50 - protein, 653 aa, Sulfuricurvum sp.
  misc_feature: SfMmc3_ORF3 polypeptide
MTIHKLAIDETGCFTMAENDKSFVCGVSISQNEQSIKQSYQKAYKEMRLGETAPNDTRSLIGDKQFHFSEMENIKKDVCRKLLLPIADKIFISTGKPIIYANNQNWWLVAVTVVISKFLETGDFKEGDSVKVYIDNRDPITFGLTDDDKMGFNKYHRNLKEQIESYVKPIADAKKIKIEIIFQSDTSNFFINLADVICGFVKKNKASVPHEIIKCSCGRFMSGSDPTTFAEKDPFLSLTLIFQELSNNKLTHINLLEKVLKRLKNDAESYLLIWDMFYDLLKFKIDERSVNSNLISLSKFVNIFFKDFNANRDKLSTSKRLELIILFVEYYSHIGGINLPYSKEDILNEMNTEGEKAESRLLRKWEKYRNYSLRSAQILFNAYNFKEAVSNFEELWSVQEKMIKNIPSFLYVQDKIKDEPTTAILGTLAQSYAYNSNFKEAVDYFELSKDYAIKTSQRTASYLFTIYHREKNIDKARECFTEQAGCIPEDFLAKLQDENVWKILSYCKLRALELYCNKTTNLPHIELEKLSNYNSEYPFPLIQKWEGIALYLENQLANRTIIEEYFTNAIDNLLNESNGFAIKTLSLPIIQCFALVNNQNPFHSKYNQILDILKKQSEYFNRYIEEKPLFSTLNKNNNGDIWERAMLLPFNYA

SEQ ID NO: 51 - protein, 678 aa, Sulfuricurvum sp.
  misc_feature: SvMmc3_ORF3 polypeptide
MAHYVLAIDETGGFMTSPFDNQKWIKSFSCGVCFIDKTEEDIKNIFVKLYNDFNGCSPNTNDLKSILRNEAFHSNKLSEDKLIKCKDAFAPIIDKAFSSKGKPSLYANNQDWWLTSVVVVIELFLDSYKFQSNDTIDIFFDGRKDTTWGALDENTSPYNPNNDQQWDIYKQYHKFLKDQIWNYISPIVTHRGLNIKLYYGQDSNNAGIAVADIVTKLVARGLSNKQFIEGIPVETRSCRQINNLNSPEKLFENDQIIEAYTTILHELENDDNKHIGMVSTILNKLSQQEEDYAIVWSLFYDFIKNRIEERKLESSQQLVEIFTGELKKILPEWSNKVKGLKELNCTDFIILINEYSSHLGIATSMPFSFDEFEKYNNEFEKYNNEFEKDNNKYEGRLLRRWENKIRFNLRAAEIRFNGYEFKTIQESMSDLCDKQDKLREMLDGGKDNHSSAILGILGQAYAFLNETSNAESKFKRSLEISDYKKEQTYSYIFTICHKVGDVEKCKEYFRLSTGIEASDYLSKLEEDRLRKFNLVSYEKLRALEIKKNGRTDLPRFDIENHSDLGNEYPIPLIKKWAAISLYLENKEENKGLIMSLLNESAESCIKGKGFVIRAMAIPMFQCVSLIGSTYSQYEKFINDLANECPGFAEYAEAVPNIKTLDNKLDIWDRALLLPFYYA

SEQ ID NO: 52 - protein, 475 aa, Smithella sp.
  misc_feature: ShMmc3_ORF3_partial
MTIHNLAIDETGCFTMAENDESFVCGVSISQNEQSIMQSYQKAYTKMRLGEIAPNDTRSLIGDNQFHFSEMGGIQKEICREFLLPIADKIFISTGKPKIYANNQNWWLVAVTVVISKFLETGDFEEGDSVNVYIDNRDPITFGLIEGDRIGIKYYHNILKKQIESYVKPIVDTKKINLNVIFKSDTSNFFINLADVVCGFVRKYRASVSHEIIKCNCGKFMSGSDPATLVDINPFLSLTLIFQEISNGKLTYIYLLEKILKPLKNDLENYSLIWDMFYDLLKFKIEERSVNSNLVALSELVSIFFKDFNANRDKLSTSKRLELMILFVEYYSHIGNVDLPYSKDDILKELNDVGERAESRLLRRWEKYRNYSLRSAQILFNDYNFEEAVSNFEELWSVQEKLIENIPPFLSVQDKIKDEPTTAILGTLAQSYAYSSNFKNAIDFFELSKDYAIKTSQRTASYLFTIYHREKNIDK

SEQ ID NO: 53 - protein, 736 aa, Unknown
  Unknown bacterial species
  misc_feature: NoMmc3_ORF3 polypeptide
MKYIFAIDETGQFDIRQTKDKSFVCGVLVKGEESKLLKAYQNIYTEFGYPEPIPSNERELLINPENSDDNARFHFKNASEKEKEIYWKHLLPFVDKVYVSTNKPILCANNQNWWLIALTVVIQKFLADPDFKLQKDDEVEILIDTRAKKTWGVLKKEDANDKKKGDYRKQINKSIKELSLSKDVRYNVTIHSKIDPEYKDVYKSIVGEIKKLGLPNDIIWNIELSSAKQQRKTESTNEHEGYHEDIAKQIKAEVEKYVPDEVRLDIEFKSDTSSLYVCFADIVCGFARSNNRKKLSDKIVECSCKNFSSGLDPIAYKNDNPLFALNIIYQEVAQDKYDNISYVEDILQKMREDKDDYEMAWDMFYDFLKSEIAERETLSKLANIRPFVQKFIDEFDSYAKENLKSGKNLEQLILFVEYHSHIGSAKNPFERKVFKNLLEQMDSSTETRTLIKWERNVSYTLRETQIYFNDYNFIAASENLSKVWSTHCKLLSILKDEIYENDENATALIGSMGQLFALREDYETAKVYFEEDSKKYAIKSNSITDSYLFAIYHRYEDIANCRNCFRLVTGNTPEDYYKDKNFDKTWNLIMYCKLRALELYEKGKTTLPAINLEDLKNYNSEYPFPLAMKWEAIARCLEKKDSNISKAKKYFADAIDNLLEEDNGFAIRTLALPIMQCFNLIDSQNPYYKSYIGILNKLKSESEYFADYVCNKPQLNDLVNDLNIWERALLLPFYYA

SEQ ID NO: 54 - protein, 353 aa, Porphyromonas sp.
  misc_feature: PcMmc3_ORF3_partial
MTIHNLAIDETGCFTMAENDKSFVCGVSISQNEQSIMQSYQKAYTKMRLGEIAPNNTRSLIGDKQFHFFQMGDIQKEICREFLLPIADKIFISTGKPKIYANNQNWWLVAVTVVISKFLETGDFKEGDSVNVYIDNRDPITFGLIEGDEIEFKDYHNILKKQIESYVKPIVDTKKINLNVIFKSDTFNFFINLADVVCGFVRKYRASVSHEIIKCNCGKFMSGSDPATLVDINPFLSLTLIFQELSNNKFTHINLLEKVLKRLKNDSESYLLIWDMFYDLLKFKIEERSINSNLVSLSEFVSIFFKDFNANRDKLSTSKRLELMILFVEYYSHIGNVDLPYSKDDILKELNDV

SEQ ID NO: 55 - protein, 657 aa, Unknown
  Unknown bacterial species
  misc_feature: No2Mmc3_ORF3
MARKYIFAIDETGCFAIKNDTRSFTCGVLINGNEFELRTAYQSVYEDFGFPEPTPTTIEGLLKTKDSIDDNARFHFNRLTEEQCEICKKHLLPFVEKVYVSKDRPVLYANNQNWWLIAITVIIREFLRDLKLQKDDMVEIWIDNRNKKVWGIEDDQDNIAFKDYHNIINQQIKNNVKDYIQNSNSLKMEFRSDTSSLFINLADIVCGFVRKDKNVLKDKIEECSCKDFNSGLDPVSYKSKNPLLAIGIIYQEADSDKFDNLSHVTDILNGLRSDSEDYEMAWDMFYDLMKKEIDERKTISKLVKLSGFVEMFFKEFCNVAKSRLSAGKSLELMVLFAEYYSHIGSTEIPFKRDEFIGILKHCDKNTETRTLRKWEKLVSYTLRESQIYLNNYDFTAAEDNLGKVWKKHEELMKVLADILYEKDEPTAALIGTLAQSYAYKDELDEAIEYFNLSKDYSIKSTNKTDSYLFTIYHRKQDVMKARESFVAQNGTTPEDYHRNAKFHDSWKLLSYFKLRALELYKNGKTALPNIEITTLPNYNCEYPFPLVMKWESLALYLEDKDANKQRIERYFNDAIENLLRTENGFTIRTLALPLMQCYSLIDNKNQYHSKYNTIMMEMKKYSSFFAKYVDERASFLNNIKNDSDLWERAMSLPFIYS

SEQ ID NO: 56 - protein, 666 aa, Sulfuricurvum sp.
  misc_feature: Sv2Mmc3_ORF3
MAHYVLAIDETGGFMTSPFDNQKWIKSFSCGVCFIDKTEEDIKNIFVKLYNDFNGCSPNTNDLKSILRNEAFHSIKLSEDKLIKCKDAFAPIIDKAFSSKDKPSLYANNQDWWLTSVVVVIELFLDSYKFQRHDTIDIFFDGRKDTTWGALDENTSPYNPNNDQQWDIYKQYHEFLKDQIWNYISPIMTHKGLNIKNIKLDYRQDSNNAGIAVADIVTKLVARGLSKKQFIEGIPVETRSCRQINNLNSPEKLFVNNQIIEAYTTILHELENDDNKHIGMVSEILNKLNQQEEDYAIVWSLFYDFIKNRIEERKLESSQQLVEIFTGELKKILPEWDKVKGLKELNCTDFIILINEYSSHLGIATSMPFSFEEFEANNNKYEGRLLRRWENKIRFNLRAAEICFNGYDFKTIQKSMSDLCDKQDKLREMLDGEKDNHSSAILGTLGQAYAFLNETSNAENKFNRSLAISDSKKGQTYSYIFTICHKVGDVEKCKEYFRLSTGIEASDYLSKLEEDRSRNFNLVSYEKLRALEIKKNGRTDLPRFDIENHSDLGNEYPIPLIKKWAAISLYLENKEENKDLIMKLLNESAESCIKGKGFAIRAMAIPMFQCVYLIGSTNSQYEKFINDLTNECPGFAEYAEAVPNIKKLDNKLDIWDRALLLPFYYA

SEQ ID NO: 57 - protein, 611 aa, Sulfuricurvum sp.
  misc_feature: Sv3Mmc3_ORF3
MAHYVLAIDETGGFMTSPFDNQKWIKSFSCGVCFIDKTEEDIKNIFVKLYNDFNGCSPNTNDLKSILRNEAFHSNKLSEDKLIKCKDAFAPIIDKAFSSKDKPSLYANNQDWWLTSVVVVIELFLDSYKFQSNDTIDIFFDGRKDTTWGALDENTSPYDPNNDQQWDIYKQYHKFLKDQIWNYISPIMTHRRLNIKLYYGQDSNNAGIAVADIVTKLVARGLSKKQFIEGIPVETRSCRQINNLNSPEKLFENDQIIEAYTTILHELENDDNKHIGMVSTILNKLNQQEEDYAIVWSLFYDFIKNRIEERKLESSQQLVEIFTGELKKILPEWSNKVKGLKELNCTDFIILINEYSSHLGIATSMPFSFDEFEKYNNKFDEFEKYNNKYEGRLLRRWENKIRFNLRAAEICFNGYDFKTIQESMSDLCDKQDKLREMLDGGKDNHSSAILGTLGQAYAFLNETSNAESKFKRSLEISDYKKEQTYSYIFTICHKVGDVEKCKEYFRLSTGIEASDYLSKLEEDRLRKFNLVSYEKLRALEIKKNGRTELPRFDIENHSDLGNEYPIPLIKKWAAISLYLENKEENKGLIMSLLNESAESCIKGKGFVIRAM

SEQ ID NO: 58 - protein, 660 aa, Unknown
  Unknown bacterial species
  misc_feature: No3Mmc3_ORF3
MAKYILAIDETGTFAIGSKQRSFVCGVVVQEREDIIRKAYQKLYKEFGFPEPVPNSINELLQSKENIEDKARFHFCRLNEEQVNICKENLLPFVNKVYISKDKPTMFANNQNWWQIAVTVVIEAFLKDYPFEERSEVEVLIDNRSDKVWGIIDDNIEFKDYHDRLKEQIGKRVEEYAKNREIKININFKSDTSSFYINLADLICGFVRKHEDVIDSDKIMEISCRTFTDNVDVCKISKQYPLSALNCIFQEVLNNNCANVSWVGKLIKRLRKDKEEYELAWDSFNEFLKLKIENRDTLAALVKAKQLVNVFLEEFRNTDPIQHLRGEQCLELATRFVEYYSHIGELSMPIDEKMFDSLLKTVDINSETRLLRRWEKKVSFVLRQSQIYFNGYDFEKFRPYIEECYNQHEKIIKSIELFNDEQDNVKDEPAAALLGTFAQTYAYIGEINTAEEYFNVSKDYAIKSNSRTDSYLFCLHHIMGDVESCRTDFESISGKTAQNYADSKDYSNLWILLIYCKLRALELHKDGETRLPHIDLQSLQSYNSEYPFPLIMKWEAIALWIENRIANKTIVERYFSDSIKNLLSKENGFAIKTLSLPIIQCYGIVNNANEFHAKYNTLCEELTKVSECFKKYVDKSEVLGSIKNNCDIWQRALSLPFIYS

SEQ ID NO: 59 - protein, 17 aa, Artificial Sequence
  Synthetic
  misc_feature: Mmc3 RuvC I consensus sequence
  misc_feature (1)..(3): Xaa can be any naturally occurring amino acid
  misc_feature (7)..(7): Xaa can be any naturally occurring amino acid
  misc_feature (9)..(10): Xaa can be any naturally occurring amino acid
XXXGIDXGXXELATLCV

SEQ ID NO: 60 - protein, 7 aa, Artificial Sequence
  Synthetic
  misc_feature: Mmc3 RuvC II consensus sequence
  misc_feature (1)..(1): Xaa can be any naturally occurring amino acid
  misc_feature (3)..(3): Xaa can be any naturally occurring amino acid
  misc_feature (6)..(6): Xaa can be any naturally occurring amino acid
XIXLEXL

SEQ ID NO: 61 - protein, 18 aa, Artificial Sequence
  Synthetic
  misc_feature: Mmc3 RuvC III consensus sequence
  misc_feature (1)..(4): Xaa can be any naturally occurring amino acid
  misc_feature (6)..(7): Xaa can be any naturally occurring amino acid
  misc_feature (15)..(15): Xaa can be any naturally occurring amino acid
  misc_feature (17)..(17): Xaa can be any naturally occurring amino acid
XXXXDXXAAYNIAKXGXE

SEQ ID NO: 62 - protein, 17 aa, Artificial Sequence
  Synthetic
  misc_feature: Cpf1 RuvC I consensus sequence
  misc_feature (1)..(1): Xaa can be any naturally occurring amino acid
  misc_feature (15)..(17): Xaa can be any naturally occurring amino acid
XIIGIDRGERNLLYXXX

SEQ ID NO: 63 - protein, 7 aa, Artificial Sequence
  Synthetic
  misc_feature: Cpf1 RuvC II consensus sequence
  misc_feature (2)..(2): Xaa can be any naturally occurring amino acid
IXVLEDL

SEQ ID NO: 64 - protein, 18 aa, Artificial Sequence
  Synthetic
  misc_feature: Cpf1 RuvC III consensus sequence
  misc_feature (2)..(2): Xaa can be any naturally occurring amino acid
  misc_feature (11)..(11): Xaa can be any naturally occurring amino acid
  misc_feature (18)..(18): Xaa can be any naturally occurring amino acid
PXDADANGAYXIALKGLX

SEQ ID NO: 65 - protein, 17 aa, Artificial Sequence
  Synthetic
  misc_feature: C2c1 RuvC I consensus sequence
  misc_feature (9)..(9): Xaa can be any naturally occurring amino acid
  misc_feature (11)..(11): Xaa can be any naturally occurring amino acid
  misc_feature (15)..(15): Xaa can be any naturally occurring amino acid
RVMSVDLGXRXAAAXSV

SEQ ID NO: 66 - protein, 7 aa, Artificial Sequence
  Synthetic
  misc_feature: C2c1 RuvC II consensus sequence
LILFEDL

SEQ ID NO: 67 - protein, 18 aa, Artificial Sequence
  Synthetic
  misc_feature: C2c1 RuvC III consensus sequence
  misc_feature (1)..(2): Xaa can be any naturally occurring amino acid
  misc_feature (14)..(14): Xaa can be any naturally occurring amino acid
  misc_feature (18)..(18): Xaa can be any naturally occurring amino acid
XXHADINAAQNLQXRFWX

SEQ ID NO: 68 - protein, 17 aa, Artificial Sequence
  Synthetic
  misc_feature: C2c3 RuvC I consensus sequence
  misc_feature (1)..(1): Xaa can be any naturally occurring amino acid
  misc_feature (10)..(12): Xaa can be any naturally occurring amino acid
XIVAIDLFEXXXGYAVF

SEQ ID NO: 69 - protein, 7 aa, Artificial Sequence
  Synthetic
  misc_feature: C2c3 RuvC II consensus sequence
  misc_feature (6)..(7): Xaa can be any naturally occurring amino acid
FPVLEXX

SEQ ID NO: 70 - protein, 18 aa, Artificial Sequence
  Synthetic
  misc_feature: C2c3 RuvC III consensus sequence
  misc_feature (1)..(2): Xaa can be any naturally occurring amino acid
  misc_feature (15)..(15): Xaa can be any naturally occurring amino acid
  misc_feature (18)..(18): Xaa can be any naturally occurring amino acid
XXHADENAAINIGRXYLX

SEQ ID NO: 71 - protein, 17 aa, Artificial Sequence
  Synthetic
  misc_feature: CasX RuvC I consensus sequence
  misc_feature (5)..(5): Xaa can be any naturally occurring amino acid
NLIGXDRFENIPAVIAL

SEQ ID NO: 72 - protein, 7 aa, Artificial Sequence
  Synthetic
  misc_feature: CasX RuvC II consensus sequence
  misc_feature (1)..(1): Xaa can be any naturally occurring amino acid
  misc_feature (3)..(3): Xaa can be any naturally occurring amino acid
XLXFENL

SEQ ID NO: 73 - protein, 18 aa, Artificial Sequence
  Synthetic
  misc_feature: CasX RuvC III consensus sequence
  misc_feature (2)..(2): Xaa can be any naturally occurring amino acid
EXHADEQAALNIARSWLF

SEQ ID NO: 74 - protein, 17 aa, Artificial Sequence
  Synthetic
  misc_feature: CasY RuvC I consensus sequence
  misc_feature (1)..(1): Xaa can be any naturally occurring amino acid
  misc_feature (3)..(3): Xaa can be any naturally occurring amino acid
  misc_feature (12)..(12): Xaa can be any naturally occurring amino acid
  misc_feature (14)..(17): Xaa can be any naturally occurring amino acid
XYXGIDIFEYGXAXXXX

SEQ ID NO: 75 - protein, 7 aa, Artificial Sequence
  Synthetic
  misc_feature: CasY RuvC II consensus sequence
  misc_feature (2)..(3): Xaa can be any naturally occurring amino acid
  misc_feature (6)..(6): Xaa can be any naturally occurring amino acid
KXXYEXE

SEQ ID NO: 76 - protein, 18 aa, Artificial Sequence
  Synthetic
  misc_feature: CasY RuvC III consensus sequence
  misc_feature (1)..(2): Xaa can be any naturally occurring amino acid
  misc_feature (9)..(11): Xaa can be any naturally occurring amino acid
  misc_feature (14)..(16): Xaa can be any naturally occurring amino acid
  misc_feature (18)..(18): Xaa can be any naturally occurring amino acid
XXDADIQAXXXIAXXXYX

SEQ ID NO: 77 - protein, 17 aa, Artificial Sequence
  Synthetic
  misc_feature: Cas9 RuvC I consensus sequence
  misc_feature (17)..(17): Xaa can be any naturally occurring amino acid
YSIGLDIGTNSVGWAVX

SEQ ID NO: 78 - protein, 7 aa, Artificial Sequence
  Synthetic
  misc_feature: Cas9 RuvC II consensus sequence
  misc_feature (1)..(1): Xaa can be any naturally occurring amino acid
XIVVEMA

SEQ ID NO: 79 - protein, 18 aa, Artificial Sequence
  Synthetic
  misc_feature: Cas9 RuvC III consensus sequence
  misc_feature (14)..(14): Xaa can be any naturally occurring amino acid
HHAHDAYLNAVIGXALLK

SEQ ID NO: 80 - protein, 1368 aa, Streptococcus pyogenes [sequence omitted]

SEQ ID NO: 81 - protein, 1307 aa, Acidaminococcus sp.
  misc_feature: AsCpf1 polypeptide
MTQFEGFTNLYQVSKTLRFELIPQGKTLKHIQEQGFIEEDKARNDHYKELKPIIDRIYKTYADQCLQLVQLDWENLSAAIDSYRKEKTEETRNALIEEQATYRNAIHDYFIGRTDNLTDAINKRHAEIYKGLFKAELFNGKVLKQLGTVTTTEHENALLRSFDKFTTYFSGFYENRKNVFSAEDISTAIPHRIVQDNFPKFKENCHIFTRLITAVPSLREHFENVKKAIGIFVSTSIEEVFSFPFYNQLLTQTQIDLYNQLLGGISREAGTEKIKGLNEVLNLAIQKNDETAHIIASLPHRFIPLFKQILSDRNTLSFILEEFKSDEEVIQSFCKYKTLLRNENVLETAEALFNELNSIDLTHIFISHKKLETISSALCDHWDTLRNALYERRISELTGKITKSAKEKVQRSLKHEDINLQEIISAAGKELSEAFKQKTSEILSHAHAALDQPLPTTLKKQEEKEILKSQLDSLLGLYHLLDWFAVDESNEVDPEFSARLTGIKLEMEPSLSFYNKARNYATKKPYSVEKFKLNFQMPTLASGWDVNKEKNNGAILFVKNGLYYLGIMPKQKGRYKALSFEPTEKTSEGFDKMYYDYFPDAAKMIPKCSTQLKAVTAHFQTHTTPILLSNNFIEPLEITKEIYDLNNPEKEPKKFQTAYAKKTGDQKGYREALCKWIDFTRDFLSKYTKTTSIDLSSLRPSSQYKDLGEYYAELNPLLYHISFQRIAEKEIMDAVETGKLYLFQIYNKDFAKGHHGKPNLHTLYWTGLFSPENLAKTSIKLNGQAELFYRPKSRMKRMAHRLGEKMLNKKLKDQKTPIPDTLYQELYDYVNHRLSHDLSDEARALLPNVITKEVSHEIIKDRRFTSDKFFFHVPITLNYQAANSPSKFNQRVNAYLKEHPETPIIGIDRGERNLIYITVIDSTGKILEQRSLNTIQQFDYQKKLDNREKERVAARQAWSVVGTIKDLKQGYLSQVIHEIVDLMIHYQAVVVLENLNFGFKSKRTGIAEKAVYQQFEKMLIDKLNCLVLKDYPAEKVGGVLNPYQLTDQFTSFAKMGTQSGFLFYVPAPYTSKIDPLTGFVDPFVWKTIKNHESRKHFLEGFDFLHYDVKTGDFILHFKMNRNLSFQRGLPGFMPAWDIVFEKNETQFDAKGTPFIAGKRIVPVIENHRFTGRYRDLYPANELIALLEEKGIVFRDGSNILPKLLENDDSHAIDTMVALIRSVLQMRNSNAATGEDYINSPVRDLNGVCFDSRFQNPEWPMDADANGAYHIALKGQLLLNHLKESKDLKLQNGISNQDWLAYIQELRN

SEQ ID NO: 82 - DNA, 28 bp, Artificial Sequence
  Synthetic
  misc_feature: Spacer1 (Sp1)
acccggggagaagtcatttaataaggcc

SEQ ID NO: 83 - DNA, 28 bp, Artificial Sequence
  Synthetic
  misc_feature: Spacer2 (Sp2)
tggtgttgacaattaatcatcggcatag

SEQ ID NO: 84 - DNA, 35 bp, Artificial Sequence
  Synthetic
  misc_feature: PJ23119 promoter
ttgacagctagctcagtcctaggtataatgctagc

SEQ ID NO: 85 - DNA, 41 bp, Artificial Sequence
  Synthetic
  misc_feature: Terminator sequence
ttatcaacttgaaaaagtggcaccgagtcggtgcttttttt

SEQ ID NO: 86 - DNA, 209 bp, Artificial Sequence
  Synthetic
  misc_feature: CR-Sp-CR construct
ttgacagctagctcagtcctaggtataatgctagcgctagcgaattcgagctcggtaccgtctataaagacgttttaatttctactattgtagatacccggggagaagtcatttaataaggccgtctataaagacgttttaatttctactattgtagatccgggaaaattatcaacttgaaaaagtggcaccgagtcggtgcttttttt

SEQ ID NO: 87 - DNA, 141 bp, Artificial Sequence
  Synthetic
  misc_feature: *CR-Sp-CR* construct
ttgacagctagctcagtcctaggtataatgctagcaatttctactattgtagatacccggggagaagtcatttaataaggccgtctataaagacgttttattatcaacttgaaaaagtggcaccgagtcggtgcttttttt

SEQ ID NO: 88 - DNA, 118 bp, Artificial Sequence
  Synthetic
  misc_feature: *CR-Sp* construct
ttgacagctagctcagtcctaggtataatgctagcaatttctactattgtagatacccggggagaagtcatttaatattatcaacttgaaaaagtggcaccgagtcggtgcttttttt

SEQ ID NO: 89 - DNA, 23 bp, Artificial Sequence
  Synthetic
  misc_feature: Truncated spacer Sp*
acccggggagaagtcatttaata

SEQ ID NO: 90 - DNA, 30 bp, Artificial Sequence
  Synthetic
  misc_feature: Spacer3 (Sp3)
ccgggaaaattatcaacttgaaaaagtggc

SEQ ID NO: 91 - DNA, 135 bp, Artificial Sequence
  Syntheetic
  misc_feature: NLS-linker-HA tag
aaacgccccgccgcgacaaagaaagcaggacaggccaagaagaagaaaggatcctacccatacgatgttccagattacgcttatccctacgacgtgcctgattatgcatacccatatgatgtccccgactatgcc

SEQ ID NO: 92 - DNA, 23 bp, Artificial Sequence
  Synthetic
  misc_feature: Mmc3_rpoB_sp1 spacer sequence
tggaccagaacaacccgctgtct

SEQ ID NO: 93 - DNA, 23 bp, Artificial Sequence
  Synthetic
  misc_feature: Mmc3_rpoB_sp2 spacer sequence
agacagcgggttgttctggtcca

SEQ ID NO: 94 - DNA, 23 bp, Artificial Sequence
  Synthetic
  misc_feature: Mmc3_rpoB_sp4 spacer sequence
cgcagcagtgaaagagttcttcg

SEQ ID NO: 95 - DNA, 23 bp, Artificial Sequence
  Synthetic
  misc_feature: Cas9_rpoB_sp1 spacer sequence
taatctcagacagcgggttgttc

SEQ ID NO: 96 - RNA, 99 nt, Artificial Sequence
  Synthetic
  misc_feature: Cas9_rpoB_Sp1_sgRNA
uaaucucagacagcggguuguucguuuuagagcuagaaauagcaaguuaaaauaaggcuaguccguuaucaacuugaaaaaguggcaccgagucggugc

SEQ ID NO: 97 - DNA, 23 bp, Artificial Sequence
  Synthetic
  misc_feature: Cas9_rpoB_sp2 spacer sequence
ttccagccagctgtctcagttta

SEQ ID NO: 98 - RNA, 99 nt, Artificial Sequence
  Synthetic
  misc_feature: Cas9_rpoB_Sp2_sgRNA
uuccagccagcugucucaguuuaguuuuagagcuagaaauagcaaguuaaaauaaggcuaguccguuaucaacuugaaaaaguggcaccgagucggugc

SEQ ID NO: 99 - RNA, 42 nt, Artificial Sequence
  Synthetic
  misc_feature: Mmc3_rpoB_Sp1_crRNA
aauuucuacuauuguagauuggaccagaacaacccgcugucu

SEQ ID NO: 100 - RNA, 42 nt, Artificial Sequence
  Synthetic
  misc_feature: Mmc3_rpoB_Sp2_crRNA
aauuucuacuauuguagauagacagcggguuguucuggucca

SEQ ID NO: 101 - RNA, 42 nt, Artificial Sequence
  Synthetic
  misc_feature: Mmc3_rpoB_Sp4
aauuucuacuauuguagaucgcagcagugaaagaguucuucg

SEQ ID NO: 102 - DNA, 1523 bp, Artificial Sequence
  Synthetic
  misc_feature: rpoB-rifR repair template for rpoB
gccacattcgccagctggaaaaagacgacgtcaaactgatcgaagtcccggttgagtacatcgcaggtaaagtggttgctaaagactatattgatgagtctaccggcgagctgatctgcgcagcgaacatggagctgagcctggatctgctggctaagctgagccagtctggtcacaagcgtatcgaaacgctgttcaccaacgatctggatcacggcccatatatctctgaaaccttacgtgtcgacccaactaacgaccgtctgagcgcactggtagaaatctaccgcatgatgcgccctggcgagccgccgactcgtgaagcagctgaaagcctgttcgagaacctgttcttctccgaagaccgttatgacttgtctgcggttggtcgtatgaagttcaaccgttctctgctgcgcgaagaaatcgaaggttccggtatcctgagcaaagacgacatcattgatgttatgaaaaagctcatcgatatccgtaacggtaaaggcgaagtcgatgatatcgaccacctcggcaaccgtcgtatccgttccgttggcgaaatggcggaaaaccagttccgcgttggcctggtacgtgtagagcgtgcggtgaaagagcgtctgtctctgggcgatctggataccctgatgccacaggatatgatcaacgccaagccgatttccgcagcagtgaaagagttcttcggttccagccagctgtctcagtttatggttcagaacaatccgttatcagagattacgcacaaacgtcgtatctccgcactcggcccaggcggtctgacccgtgaacgtgcaggcttcgaagttcgagacgtacacccgactcactacggtcgcgtatgtccaatcgaaacccctgaaggtccgaacatcggtctgatcaactctctgtccgtgtacgcacagactaacgaatacggcttccttgagactccgtatcgtaaagtgaccgacggtgttgtaactgacgaaattcactacctgtctgctatcgaagaaggcaactacgttatcgcccaggcgaactccaacttggatgaagaaggccacttcgtagaagacctggtaacttgccgtagcaaaggcgaatccagcttgttcagccgcgaccaggttgactacatggacgtatccacccagcaggtggtatccgtcggtgcgtccctgatcccgttcctggaacacgatgacgccaaccgtgcattgatgggtgcgaacatgcaacgtcaggccgttccgactctgcgcgctgataagccgctggttggtactggtatggaacgtgctgttgccgttgactccggtgtaactgcggtagctaaacgtggtggtgtcgttcagtacgtggatgcttcccgtatcgttatcaaagttaacgaagacgagatgtatccgggtgaagcaggtatcgacatctacaacctgaccaaatacacccgttctaaccagaacacctgtatcaaccagatgccgtgtgtgtctctgggtgaaccggttgaacgt

SEQ ID NO: 103 - DNA, 3720 bp, Artificial Sequence
  Synthetic
  misc_feature: BdMmc3 effector codon optimized for Saccharomyces cerevisiae
atggaaaactatataaataagtaccagatttcgaaaactctacgtttcggacttatagctaacgaacgtaaggttaaaaaagagaatgaacacaaaattaaacaggagaacctatataagtcacacagtgagttaaaagaccttattgagatatcagaaaagaacatcaaaaaaaaccttcccaaaaacgctgtccaggcccaattgccaataaatactatacgtaaatgcatagatgaaataaaggagcatcttaaatcctgggaacaagtgcatactcgttatgatcaaattgcagtcttaaaggatttttataggaaattagaaaggaaggcaagatttgacggtttctggaaggataaaaatagggtacgtcaaccacaatcgcaggagataaccctttcctcgttgaagtataagtatgaaaataaggagattaaagatcatataataggttattgggcaaagaatataagaaagacaaaagagaagcttaacgaggtcgatatagttctacagcgtttcgaggaagcaagaaaggaaaatcgtacggacaagatgttaaatgaggtagaattaaggaagctatttctttcactaacttccttggtgaacgaggtgcttgggccgctaatccgtaggtccatccaatttcccaatgcagaaaaattgactgagagtaatgaagataaaaaagtgaaagagttcgcctttaacgggaaaaaggagaccctattcgactcgataattgtcttgaaggcttattttcaagagaatggaggatacgtgccgtatggcagagtgacgatgaacaagtttactgccctacagaagccaaacaagaccgacggggagattgatgaagtaataaaaacgttgaagttaaaggaatttttgagtgagtataaagatataacgtcactagacaggaagttagagagtagtaaggacaaaaaagatgctttaaaggacaactccctttctcttattgagcgtgtacagtacttcaagtataaaaccatcccgatcggagttcagttcgccttgagtgagtacctaagtaaaaacgagattgaacagaaaagaattttcgagctattagaaagtattggtaagccaaagtcccctgccaaagactatgcagacttggaaaacaagaatgatttcgatctatataagtatccattaaaggttgccttcgactatgcttgggaatcgcttgctaagtacgagtaccataaaaatatagattttcccaaggacaaatgcaaattctttctaaaggatacatttaacttcgacaccgacaacaaagactttaaactatatgcagatttattattcataagggaaaacttggccacattagattactccaacccaaacgacaaaaatgttcatattcgtaacatatcttcagcttttgacaagattgactctaggttaaaccaaaaacaaaagtccgcaactaaaaacatcttggcatggcataaaggaaatttgtctaaggaaatcgtttatcagaatgctaagcaagaaatcggtcgtctaaggggtgggcttaaaaacaaggtctctgacttcctatcactaaccaatatctttaaagagatagcccctgagtttggcaggcaattcgccaacttgagggataaattcaatgaggagaacgagatcaataaaatctctcactatggtgctatagtagaggattctaacaaggatcgttacttgttaatctatccgctaaatgacgacagggacggcgttgacacgatctttcccgaagatgggaaagttgggtttaaaatgtacatggcaaaatctctaacgtcaaaaacgctatggaaattcatatgcaaccaaaaaggcgtttctgaggattttcacaagaaggataaaaagtggaacatcccgaagactcaattcggcaaagtggataaagccaaactagatgaagattacaacctaaaaaatgtgatcgattgtttacaaaactcaaatatggctaaagcccaaaaatggaatgagttcggctgggacttcacccactgcagaacgtactccgacatagaaaaagaagttgatagaaaaggacatttgttgaaggataataatcatatttccatggagaaactagaggagttgatcaacaaggatagatgtcttttacttcccatcgttaaccaggatctaattaggcaggacaggattcctaagaatcagttcaccaaagattggtcgaagatatttacaagtgatcgttcctataggctacatcccgagttcaacgtctcctatagacacgccacgccaaattacccaaagccagaagaaaaaaggtatagtagatttcagatgatagcacacttccagtgtgaaatagttcctcaaatagacaattacatatccaaaaaggaacagattaaaatcttcaacgacaaggaaatccaaactaacgaagtggcaaaatttaataacaacctaataatttcggaagattatatgatctttggtatcgaccgtggcttaaaacaattagccacactttgcgtgttggacaaaaacggaaagattcaaggcgattttaaaatttacaccagatatttcgacaccgataagaaacagtggattcacgaacttttggagaaaaaacgtgacatcctagacttatccaacctacgtgtggagacaacaataaggggtgataaagtattggtggacctaaacgaggttgaggtcaaagagaaggacaaagaagacaaatataagaagaaccccgatgggacgtacgtgtacactaaggagaaccaacaaaagattaaacttaagaagttggcctatatcagaaagttgcaatttaagatgcagacagagtcgcaaaaagtactagatttcgctaagcagaacacgaccgagcaagctgtaatcgaaaacatccaaaacttaatatcaccttataaagaaggaaagaattatgatgacctaccagccgacgtcattttgaatatgttacagcagtttaaggagtttagtgagaatgccgacactcaatccatacgtgaattaatcgagttagatgctacggataaccttaagtcaggcgttgtggcaaatatgataggagtgatcgtgtatctattgatggagaagtataacgggaaggccatcatagctctagaggatttgaccagagctttttcattttccaaagacggcttaaacggctacgccctattcggcactaactacgatgagacggtcgactttaaggaacaagagaacttagctcttgcaggtacaggcacctaccaattcttcgagatgcaattgctaaaaaagttgttcaagattggacaagaacaaaacgttttgacggtgccagcattcaggtcagttgacaactatgagaaaatcgtaagaagagacaagcagaactcaggcgatgaatttgtaaattatccgttcgggatcgtcacatttgtggaccctaaatttacctcaaagagatgccctaagtgtggaaaaaccaatgtgaatcgtaaggacaatatcgtcacgtgtaaggacaaaaactgcggtttccagacaaaagatgggaattcgtttgaagcaaacaatatacactttataaccaatggagaccaaaacggcgggtaccacatcgcactaaaggccctaaagaatatcaacatcaaagacaatcagaacaatcacgat

SEQ ID NO: 104 - DNA, 3516 bp, Artificial Sequence
  Synthetic
  misc_feature: NoMmc3 effector codon optimized for Saccharomyces cerevisiae
atgaataacataaaaacaactaaagcaataaggtttaagctagaaaattcagcatccaaccgtgaaatccaagaacgtataaataacctatcgtccaataacggctttgacttggtaagtttcgtgaccgaactagataactatattgacaatttagagaactacctattttacaagaaaggcgagtatctttatatgaaggataaaatcattttgaagaaagagtggatgaaaaattacggtaaacaagaactagcagagttcaagaacaagaacaataagcccaccaaaggggctcgtgtgcagtataaagttggggagtacaaagtggaacttaagatacaagatgcctttgacaacattgatgaaatctacggagagctatgcgatgatgcttcgagagaattaaatgagagatcgaagagaactaggaccgcattgcttcttaagcgtttatacgcaaagaacaatctaccgctattggtagatttcgttgagaactccatttcgaaaaaagagttgggtaacgattccctaatgttaaaatcaatgggaaagagattgatggagcacttagagttaggcatccaagaatatcttccggaacaatccgcaggagtatccatcgccaaggcctcgttcaattattacactatcaacaagaagtcaatagactacgatacaaaaatccaggaaattgaacgtaacctattcgttaacaacatcgacaggatatggaatgaccgtgacaacaaaatcaaggacaatgataatgtaaaggctgatatcgcttctaggcaaaacaacaagcctttatgcatcggcgattcgccgtttatggatgtcgatgagtacgcaagtttaagacagatattaaagaatatattatctgaacagaaagcagacttcaataaattaatgcagcaaggaggttcctacaaggaacttcaaaatacagatctatatttatttaaggacataaccaaggatgaattcgacaaatattccgagctaaccgaagacatcgaagagcttgctaccaagcgtaatcaaaccaagaatgaacagaaaaaaaaggaacttaagtctcaaattgagatattggccaagcagagagggtcatttatctcggaggctgacaaaactaccgagaagatgtttaagacttacaaggcattctcagtgctatacaagaagattgcacagaaacatggaaaagagcttgcaaaacttaagggtatagaaaaggagaaagcagaatctcagactttgcaatactgggcaatgatactagagaaggataataggcacaaattagtcctaatacctaaagccaaggctaatgaatgcagatctaggttggtagaagcagacaatgccaatggtaacatcaaactatactggtttgagtccttcacttacaggtcattacagaaattgtgttttggcaatatagagaacggctcaaacacgttctatcctcaaatacgtcgtgactctatgttatcgtcaaaatactctacacgtgaccgtaacgggtattacaagttcatatccggcgaatacgagtttgccggcgatgagcagaggaaaatccaattctaccaggacgttttgagaaccgattacgccaagaaaaatttaaaccttcctaatagagaagtaaaagagaaaataattaactcaacgttcgaaagtcttgacgattttaagattgcccttgagtcaatatgctacaggagggccgtctgcactaatattcacttaatcgatgcacttgagagtgaattcggcgcacaagtctttgatatcacgtctttagaccttaggagggaggataatataaaggacaaggaagagaaatattcatactcatataagtctcataccgctgtgtggaaagagttttggacagccgaaaacgagaaatccaattttgatatccgtcttaacccagagatctctatcatctatagaaaggcaaaagaatcgaggattgaaaaatatggtgctgattctaaaaaaaacaacaggtaccttcacgatcaacttactctagtcactactttaagtgagcattgtaactccccagaaagaaacatcgctttcgccaccattgatgacgaaaaaaggataatcgcagagttcaattcgaagcttgacaaaaagaacatcaggttcgccttcggaatcgacaatggggaagtcgaattatctactcttggggtataccttccgcaatttaaacaggactcaatcgaatcatcattaaaagaagtaacgaatgttgacaagtacggattcgatactcttaccatacgttctcttatgtattcagagaaagacgtgaacgggagggatcgtaggattattgataatccatcatattttctaaaggaggatctttactgtcgtacgtttggcaaaaacggtgatgagtataaggctatgttcgataaagtctttgagcagagaaggcttcttaccctagacctttctacagccaaggtaatttgtgggcgtatagtcacgaatggggatgtcatctctttatataacctttggatgcgtcacgctcaaagaaatatatacgacatgaatgaacatattgaaggcggaggagccaaggtttatctaaaaaaatcggaagtcttaaatgacaacgaaaaacgtaaattccttgactacctaaacgacggaaatgagaaatatgagaagttgagtgacgcagataagaaggactatattgattggatttaccagatatgggatggaaaagaggtcgagaataagagattcgcaaaggttaacagggatcagaaaaggaccgggttttacttccataacgtgcttttagccgcttcgtacataggtgaagaagttcaggacgtaaaagatatagctgatattgaggatattaggcacgttttcaaattcagggaagatttcaaacaattcaaacccgagaatgaaatgcttgacgagatcaacaagtacaacattaaggttatctccaatgaagaacttgacttaaagttgaaccagcttaagtccagtctagtagccaacgtaataggtgtaatcgactatctttataagcaatataaagaaaggttcggtggagagggaattatcgcaaaagagggtttcgggatgagtaccgtagagggagctcgtatgaaattttcgggaaatatttataggatgcttgaaagaaaattataccagaaatttcaaaattacggtatggtgcctccgataaagaaccttactgcttttcgtgaggacgatcacgctaataaaaacaatcaatacacgcagattggttacatttgctttatcgactatgcaggaactagtcaaagatgccccatctgtgatactaagttggcctataaccacgggactgagtgctccgcaaagtgcgggtttgattcagaaggtattatgcattccaacgacgggattgccggttacaatatcgcaaagaagggttttgaatcgataaccaacaac

SEQ ID NO: 105 - DNA, 4140 bp, Artificial Sequence
  Synthetic
  misc_feature: Cas9 effector codon optimized for Saccharomyces cerevisiae
atggataagaaatactctatcggtttggatattggtactaactccgttggttgggccgttatcactgatgaatacaaggttccatctaagaagttcaaagttttgggtaacactgatagacactctatcaagaagaacttgattggtgctttgttatttgactctggtgaaaccgctgaggctacccgtttaaaaagaactgctagacgtagatacacccgtcgtaaaaacagaatctgttatttgcaagagatcttctccaacgaaatggctaaggttgacgactcttttttccatagattagaagaatctttcttagttgaagaagataagaagcacgaacgtcatccaatcttcggtaacattgtcgacgaagttgcttaccatgaaaagtacccaactatctatcacttgagaaagaaattggttgattctactgacaaagccgacttgagattgatctacttggctttagctcatatgatcaaattccgtggtcattttttaattgaaggtgatttgaacccagacaactctgacgttgataaattgttcatccaattggttcaaacctataaccaattgtttgaagaaaacccaattaacgcttctggtgttgatgctaaggctatcttgtctgctagattgtctaaatctagaagattggaaaacttaattgctcaattgccaggtgaaaaaaaaaacggtttgttcggtaatttgattgctttatccttgggtttgaccccaaatttcaagtccaactttgatttggctgaagatgccaagttgcaattgtctaaggatacttacgatgatgatttagataacttattggctcaaattggtgatcaatacgctgatttgtttttagctgccaagaatttgtccgacgccattttgttgtctgacatcttgagagtcaacactgaaattaccaaggcccctttgtctgcttctatgattaagagatatgacgaacaccaccaagacttgaccttgttgaaggctttggttagacaacaattacctgaaaagtataaggaaatttttttcgaccaatctaagaacggttacgctggttacattgacggtggtgcctctcaagaagaattctacaaattcatcaaaccaatcttggaaaagatggacggtactgaagaattgttagttaaattgaacagagaagacttgttgagaaaacaaagaacctttgacaacggttccattcctcaccaaatccacttgggtgagttacacgctattttgagaagacaagaagatttctacccattcttaaaggacaaccgtgaaaagattgaaaagattttgaccttcagaattccatactacgtcggtcctttggctcgtggtaactccagattcgcctggatgactagaaagtccgaagaaactattactccatggaacttcgaagaagtcgttgacaagggtgcttctgctcaatcctttatcgaaagaatgaccaacttcgacaaaaacttgccaaacgaaaaagtcttgccaaagcactctttgttgtatgaatactttactgtttataatgaattgactaaagttaagtacgttactgaaggtatgagaaaaccagcttttttatctggtgaacaaaaaaaagctatcgtcgatttgttgttcaaaactaaccgtaaagttaccgtcaagcaattgaaggaagattacttcaagaagattgaatgttttgactccgtcgaaatctccggtgttgaagacagattcaatgcttctttgggtacttaccacgacttgttgaaaattatcaaggacaaggatttcttagataacgaagaaaacgaagacattttggaagatattgtcttgactttgactttgttcgaagatagagaaatgattgaagaaagattgaagacttatgctcatttgttcgacgataaggtcatgaagcaattaaagagaagacgttacactggttggggtagattgtctagaaaattgattaacggtatccgtgataaacaatctggtaagaccatcttggatttcttaaagtctgatggttttgccaacagaaacttcatgcaattgatccacgacgactctttgactttcaaggaggacattcaaaaggctcaagtttctggtcaaggtgactctttgcatgaacacattgccaacttggctggttctccagctattaagaagggtatcttgcaaactgttaaggttgttgatgaattagttaaggtcatgggtagacacaagccagaaaacatcgtcatcgaaatggctagagaaaaccaaactactcaaaagggtcaaaagaattctagagaaagaatgaagagaattgaggaaggtattaaggaattaggttcccaaattttgaaggaacatccagtcgaaaacactcaattgcaaaacgaaaaattgtacttgtactacttacaaaacggtagagatatgtatgtcgaccaagagttggacatcaacagattgtccgactacgatgttgatcacatcgttccacaatccttcttaaaggacgactctatcgacaacaaggtcttaaccagatccgacaaaaacagaggtaagtctgacaacgttccatccgaagaagttgttaaaaagatgaagaactactggagacaattgttgaacgccaaattgatcactcaaagaaagttcgataatttgaccaaggctgaaagaggtggtttgtctgaattggataaggctggttttattaaaagacaattggttgagactagacaaatcaccaagcatgtcgctcaaattttagattccagaatgaacactaaatacgacgaaaacgataagttaattagagaagttaaggttattaccttgaagtctaagttggtttctgatttcagaaaggacttccaattttacaaggtcagagaaattaacaactaccatcacgctcatgatgcttacttgaacgccgttgttggtaccgctttgattaaaaagtacccaaagttggaatccgaatttgtctacggtgactacaaggtctacgatgtcagaaaaatgatcgctaagtccgaacaagagattggtaaggctactgccaagtacttcttttactctaacatcatgaactttttcaagactgaaatcactttagctaacggtgaaattcgtaagagaccattgattgaaaccaacggtgagactggtgaaatcgtttgggataagggtcgtgatttcgctactgttagaaaggtcttatctatgccacaagttaacatcgtcaagaaaaccgaagttcaaactggtggtttttctaaggaatctatcttgccaaaaagaaactctgataaattgattgctagaaagaaggattgggacccaaagaagtacggtggtttcgattccccaaccgtcgcttactccgtcttggttgtcgctaaagttgaaaagggtaagtccaagaaattgaagtctgttaaggaattgttgggtatcactatcatggaaagatcttccttcgaaaagaacccaatcgattttttagaggccaagggttataaggaagttaaaaaggacttaattattaagttgccaaagtactctttgttcgaattagaaaacggtagaaaaagaatgttggcctctgctggtgagttgcaaaaaggtaacgaattggccttgccatctaagtatgttaactttttgtacttggcctctcattacgagaagttgaagggttccccagaagataacgaacaaaagcaattgttcgtcgaacaacacaaacattacttggatgaaattatcgaacaaatctccgagttttccaaacgtgttatcttggctgacgccaatttggataaggttttgtctgcttataataagcatagagataagccaattagagaacaagccgagaacatcattcacttgttcactttgactaatttaggtgctccagctgccttcaaatatttcgacaccaccattgatagaaagagatacacctccactaaggaagtcttggatgccaccttgattcaccaatctatcactggtttgtacgaaactagaatcgatttgtctcaattaggtggtgattcccgtgccgacccaaagaagaagagaaaggtctaa

SEQ ID NO: 106 - DNA, 4014 bp, Artificial Sequence
  Synthetic
  misc_feature: AsCpf1effector codon optimized for Saccharomyces cerevisiae
atgacgcaattcgaggggtttactaatttatatcaagtatcgaagacgcttagattcgagctaatccctcaaggaaaaacgcttaagcatattcaggaacagggttttatcgaggaagataaagccagaaacgaccattacaaggagttaaaaccaattatagacagaatttataagacgtatgctgatcaatgtttacaactagtacaattagattgggaaaacttgtctgccgctattgattcgtatagaaaggagaagacagaagagacaagaaacgcattgattgaagaacaagcaacgtaccgtaacgctatccatgactatttcattggccgtacggataatttgactgacgcaataaacaagagacacgctgaaatctacaaggggttgttcaaggctgagttgtttaatggtaaggtcttaaagcagcttggaacggttacgacgactgagcacgagaatgctctacttcgttcgtttgataaatttactacttatttctccggtttttacgaaaacagaaaaaacgtcttctcggcagaagatatatccaccgcaatcccacacagaatagtgcaagataactttccaaaatttaaggaaaattgccatattttcacacgtctaatcactgccgtaccttcactaagggaacattttgagaatgttaagaaggcaattggaatctttgtctctacctcgattgaagaagtcttctcattcccgttctacaatcaattactaacgcagactcaaatagacttgtataatcaattgcttggtgggatctcacgtgaagctggtacagaaaagataaagggtcttaatgaagttcttaacttggctatccagaaaaacgatgagacggctcatattatcgcctctttaccacaccgtttcatacctttatttaagcaaatcctatcagatcgtaacacattaagttttatcctagaggaatttaaatcagatgaagaggtgatacagtcattctgtaaatacaagacgcttcttcgtaacgaaaatgtcctagaaactgcagaagcattgtttaatgaacttaatagtattgatctaacgcatatctttatatcgcacaagaagttagagacaatatcgtcggctctttgcgatcattgggatacgttacgtaatgccttgtacgagaggcgtatctccgagctaaccggaaagataaccaagtcggctaaggagaaggttcaaagatcacttaagcacgaggacattaatttgcaagagatcatatctgccgccggcaaagaactatccgaagcttttaagcaaaaaacgtccgagatcctttctcacgctcacgctgcactagatcagccgttgccaacgactcttaagaaacaggaagagaaagaaatcctaaaatcgcaacttgactctttattagggttatatcatctactagactggttcgccgttgacgaatctaacgaggtcgatccggaatttagtgcaagactaacaggcattaaattagaaatggaaccgtcactttccttctataataaggcccgtaattacgcaaccaaaaaaccctacagtgtcgaaaagttcaagttaaatttccaaatgcccacgcttgcatccggctgggatgtaaataaagaaaaaaacaacggtgctatcctattcgtaaaaaatgggttgtattacctagggattatgccgaaacagaaggggaggtacaaggccctttcgtttgagcctactgagaaaaccagtgaaggttttgataagatgtattacgattactttcccgacgcagctaaaatgattccgaagtgcagtacacagcttaaagcagtaaccgcccattttcaaactcacactactcccattttattatcgaataatttcatagaacctttagaaataaccaaagagatatacgaccttaacaacccagagaaagaacctaagaagttccagacagcttatgctaaaaaaaccggtgaccagaagggctatagggaggctttatgcaaatggattgatttcacaagagattttctatctaaatatactaaaaccacttccatcgatttgtcatcacttcgtccctcctcacagtataaggatctaggagaatattacgccgagttgaatccacttctttatcacatatccttccagaggatagcagagaaagaaataatggacgcagtcgagacaggcaaactatatctttttcaaatttataacaaagatttcgccaagggccaccatggtaagcctaacctacatacgctatattggactggtttattcagtccggaaaatttggccaagaccagtatcaaactaaatgggcaagcagaactattttataggcccaagtcgaggatgaaacgtatggcccatagacttggggagaaaatgttgaataagaaattaaaagatcaaaaaactccaatccccgatactttgtatcaggagctatatgattacgtaaatcaccgtttatcacatgatttgtctgacgaagcaagagctttattacccaatgttattacgaaagaagtatcgcacgagattattaaggaccgtaggttcactagtgacaagttcttttttcatgtgccaataaccttgaactatcaagccgcaaacagtccctcgaagtttaatcaacgtgttaacgcatatttgaaggagcacccggagactcctattatcggcatagaccgtggagagaggaacctaatatacattactgtgattgactccacagggaaaatattggagcaacgtagtttaaatacgatccagcaatttgattatcagaagaaattggacaatagagaaaaggaaagagtagcagcacgtcaagcctggtctgtcgtcggtacgataaaggatttaaaacaggggtacttatcgcaagtgattcacgaaatagttgacttgatgatacactaccaggcagtagtggttctagagaaccttaactttggtttcaagtccaaaaggacgggcatagccgaaaaagccgtgtatcagcagttcgaaaaaatgttgattgataagttgaattgccttgtattaaaggactatccggctgaaaaagttggcggtgttttgaacccttatcaattgacggatcagtttacttcgtttgccaaaatgggcactcaatctgggtttcttttttacgtgccggctccatacacgtccaagatagatcctttgaccgggttcgtagatccttttgtgtggaagaccataaaaaaccacgagtcgagaaaacattttctagagggatttgacttccttcattacgacgtaaagactggtgattttattttacactttaaaatgaacagaaatctatcgtttcaacgtggcctaccaggctttatgcccgcttgggatattgtttttgagaagaatgaaacccagtttgacgccaagggaactccattcattgcagggaaacgtattgttcccgttatagaaaatcacagatttactggaaggtatcgtgacttgtatcccgcaaatgagttgattgctctattagaggagaaggggatcgttttccgtgacgggtccaatatattgccaaagctacttgaaaacgacgattcacatgctattgacaccatggtagccttgataagaagtgtattacagatgagaaatagtaatgccgcaacgggtgaagattacattaatagtccagtccgtgatttaaacggagtgtgcttcgactcgcgtttccagaacccagaatggccaatggatgctgacgcaaacggtgcttaccatatagcccttaaagggcagctacttctaaatcatctaaaggaatcaaaagaccttaaattacaaaacggtatttcaaaccaagactggcttgcctatatacaagaattgagaaatagtagagccgaccctaaaaagaagcgtaaggtccctgctgcaaagagagttaaactagatggatcccatcatcatcaccaccatcatcattaa

SEQ ID NO: 107 - DNA, 560 bp, Saccharomyces cerevisiae
  misc_feature: pFBA1 promoter
ggcttcacatacgttgcatacgtcgatatagataataatgataatgacagcaggattatcgtaatacgtaatagttgaaaatctcaaaaatgtgtgggtcattacgtaaataatgataggaatgggattcttctatttttcctttttccattctagcagccgtcgggaaaacgtggcatcctctctttcgggctcaattggagtcacgctgccgtgagcatcctctctttccatatctaacaactgagcacgtaaccaatggaaaagcatgagcttagcgttgctccaaaaaagtattggatggttaataccatttgtctgttctcttctgactttgactcctcaaaaaaaaaaaatctacaatcaacagatcgcttcaattacgccctcacaaaaacttttttccttcttcttcgcccacgttaaattttatccctcatgttgtctaacggatttctgcacttgatttattataaaaagacaaagacataatacttctctatcaatttcagttattgttcttccttgcgttattcttctgttcttctttttcttttgtc

SEQ ID NO: 108 - DNA, 78 bp, Artificial Sequence
  Synthetic
  misc_feature: Encodes NLS-SV40-cMyc-His
cctaaaaagaagcgtaaggtccctgctgcaaagagagttaaactagatggatcccatcatcatcaccaccatcatcat

SEQ ID NO: 109 - protein, 7 aa, Artificial Sequence
  Synthetic
  misc_feature: SV40 NLS
PKKKRKV

SEQ ID NO: 110 - DNA, 43 bp, Artificial Sequence
  Synthetic
  misc_feature: Non-targeting guide for BdMmc3
taatttctactcttgtagatcaagaatgggcatgaggtggcaa

SEQ ID NO: 111 - RNA, 41 nt, Artificial Sequence
  Synthetic
  misc_feature: BdMmc3_OriT_T1 crRNA
auuucuacuauuguagauagcaggccgcccaggcggcccag

SEQ ID NO: 112 - RNA, 41 nt, Artificial Sequence
  Synthetic
  misc_feature: BdMmc3_OriT_T2 crRNA
auuucuacuauuguagaucucaaucgcucuucguucgucug

SEQ ID NO: 113 - RNA, 41 nt, Artificial Sequence
  Synthetic
  misc_feature: BdMmc3_OriT_T3 crRNA
auuucuacuauuguagauaucagccauccgcuugcccucau

SEQ ID NO: 114 - RNA, 43 nt, Artificial Sequence
  Synthetic
  misc_feature: Non-targeting guide RNA for SfpMmc3
uaauuucuacucuuguagaucaagaaugggcaugagguggcaa

SEQ ID NO: 115 - RNA, 41 nt, Artificial Sequence
  Synthetic
  misc_feature: SfpMmc3_OriT_T1 guide RNA
auuucuacuguuguagauagcaggccgcccaggcggcccag

SEQ ID NO: 116 - RNA, 41 nt, Artificial Sequence
  Synthetic
  misc_feature: SfpMmc3_OriT_T2 guide RNA
auuucuacuguuguagaucucaaucgcucuucguucgucug

SEQ ID NO: 117 - RNA, 41 nt, Artificial Sequence
  Synthetic
  misc_feature: SfpMmc3_OriT_T3 guide RNA
auuucuacuguuguagauaucagccauccgcuugcccucau

SEQ ID NO: 118 - RNA, 43 nt, Artificial Sequence; identical to SEQ ID NO: 114
  Synthetic
  misc_feature: Non-targeting guide for AsCpf1

SEQ ID NO: 119 - RNA, 43 nt, Artificial Sequence
  Synthetic
  misc_feature: AsCpf1_OriT_T1 crRNA
uaauuucuacucuuguagauagcaggccgcccaggcggcccag

SEQ ID NO: 120 - RNA, 43 nt, Artificial Sequence
  Synthetic
  misc_feature: AsCpf1_OriT_T2 crRNA
uaauuucuacucuuguagaucucaaucgcucuucguucgucug

SEQ ID NO: 121 - DNA, 43 bp, Artificial Sequence
  Synthetic
  misc_feature: AsCpf1_OriT_T3
uaauuucuacucuuguagauatcagccatccgcttgccctcat

SEQ ID NO: 122 - RNA, 43 nt, Artificial Sequence; identical to SEQ ID NO: 114
  Synthetic
  misc_feature: Non-targeting guide for Cas9

SEQ ID NO: 123 - DNA, 103 bp, Artificial Sequence
  Synthetic
  misc_feature: Cas9_OriT_T1
gcaggccgcccaggcggcccguuuuagagcuagaaauagcaaguuaaaauaaggcuaguccguuaucaacuugaaaaaguggcaccgagucggtgcuuuuuuu

SEQ ID NO: 124 - DNA, 103 bp, Artificial Sequence
  Synthetic
  misc_feature: Cas9_OriT_T2
ucaaucgcucuucguucgucguuuuagagcuagaaauagcaaguuaaaauaaggcuaguccguuaucaacuugaaaaaguggcaccgagucggtgcuuuuuuu

SEQ ID NO: 125 - DNA, 103 bp, Artificial Sequence
  Synthetic
  misc_feature: Cas9_OriT_T3
aacagaugagggcaagcggaguuuuagagcuagaaauagcaaguuaaaauaaggcuaguccguuaucaacuugaaaaaguggcaccgagucggtgcuuuuuuu

SEQ ID NO: 126 - DNA, 3891 bp, Artificial Sequence
  Synthetic
  misc_feature: SfMmc3 effector codon optimized for Saccharomyces cerevisiae
atggagaatattaaaaatggttaccaactttcgaaaaccttgagattcgggcttactcagaagtgcaaaaagaggcgtaagaactacgagggcgaaatatacgaatcacacaaggagttaaacgaccttattatgttctcggaagagcgtattaaacaatcgttatccatcgataagaaatcagaactacaatttagtattaataacattgaaaaatgccttctactagtagataatttctttttctcttggcagcaggtataccaacgtgacgatcaaatcgctcttgataaagattactataagatactttgcaaaaaaatagggtttaacggcttttggacagaaagacgtcgtgaacagagggtaaagaaaccgcaaagtcgtgtgatatccctttcggagctaaagaaacctgacgagttggggaagaaaagattccagtacatattagattactggcgtgagaaccttttaaacgttgcagaaaagtacaatgttgttagtgagaagctaaaacaatttcaagacgctctaaaaattaataggacggacaacaaaccaaacgaagtagagttgaggaagtcgttcttgtctctattgcatttggtgaatgacactttaatgccgttgtgctacggtcagatcttgttccccaaaattgagaaattagactcgtccaagagtcacaatcaaaaattgattgagttcgctacggatcatcagtcaaaatcggatttgctatccgagataactgaaataaagaaatactttgaggaaaacggtggtaatgttcccttttgccgtgccacactaaatccgaacaccgcaataaaaaaccccaagtctagtgacaataaaattgaagaagagattaatatcatcggattatctaatattttaaaagagcataagtcggtccttttctatgacaagtatttggaagacttgagtgtcaaggagaagatcaaccttttgaagaacaaagattctaattcgatcactaggtcgttgatgtttaagtgtaagtctgtgcccgccattgttcaatatgagatcgctaaaaccctatctagaaaattagacaaatcggaagaagatattagaaacttcttgagggggatcggccaggcaaagtccccagctaaggactatgctgacctacaaaataagaacgactttaatatagaggcctacccactaaaggttgctttcgatttcgcatgggaggggttagcaaggtctatttatcatccggacgcatcatttccgttggaacaatgtcgtaggtttctaaatgacaacttcggtgtcaacaaagaggataataactttcaattatatgcaaaactacaagaattgagggactatctttctgtactagaacacaataaattgaaagacggcacggcccaaataaacgctgctagagaaattatagagtcgcttgactggcaaaagaattttggtgataggggaaacggttacaaacgtagtatcactgtgtggcttaataaatggaagccaaaccttcaggacaatgatgataccgatttcaagacagccaagcagcaaatcgggttgtttaggggctctctaaagaacaaaattaagaaatattatgaaattacacagacctacaaagacattgccatgcagaccgggaggaccttcgctaagatgagggacaagataagtggggccgcagagctaaacaaggtaagtcattacgcaatgataatcgaggatagtaacgcagacaaatacgttctattgcaggagttcacggaaaaaaaaggtgaccgtatctatgctaaaacagactataacaacggggatatcactgcatatgctgttaactccgtcacaagtggcgcaattgctaagatgataaaaaaaaagagacttgattcattcaatgataaatatggggaatcgactttccagcaacaggagttaacgaaagaacagaaagaacagaagaatataagggagtggaagtcattcatcgaagagaagcgttgggacttagaattcaagttaaacacaaaagtaaaaacgttcgaacagctaaagaaggagatcgactcaaagtgttatgaactaaacaaaaaatacattagtagggacgtcttggacgacttgattaacaataagaactgtcttctattaccgatcgtatctcaagacttagccaaaaaggagaagtcggaaatcaaccaattcacgaaggattggaacgcagtcttcgcccaaaacacaccttggagacttacaccggaatttagaatatcttaccgtaaaccgacaccaaactaccccgagtccgacaagggggacaaaaggtattcgcgtttccaaatgattggacacttcctatgcgactatataccaaagaacgactactacattagtactagagaacagatagccatttacaaggatgacaagcaacaggagaccgccgttaatcgttttcacgataagcttaagggcagaacagaggccgaggaacatgtcgattcgatcaacgcattaatagctaagttcggcagtgtgaacaagaaacagaaaagtatagtggttgataaacccaaagaggaattttatgttttcggtattgaccgtggacaaaaggaactagcaacactatgcgtgattgatcataacaaaaaaatcatcggaaattttgatatatatgtcaggagtttcaattctatctcaaaacaatgggaacataaatttctagagaaaagacatatacttgacctatcaaacctaagggtcgaaacgactctttttatagatggtaaaccggagaagcgtaaggttctagtagatctttccgaagtcaaggttaaagataagaacggaaatttcacaaagccggataaaatgcaaatcaaaatgcagcagcttgcatacatacgtaagttgcaatttcaaatgcaaaccaatcccgacgtggtacttgcatggtatgaaaagaattccacgaaagaaatgatgttgaagaatttcgtaaagaaatctgatgatgacaacaacggattagtctcattttacggagcagccgttgaggaactagagaatactctacccatagaaagaatcagtgagatgctacagaagtttgacttgctaaagaaacaggaaaaggagggtgaggatataaaacttcaaatagacaagctagtacaacttgatcctgtagacaacttgaaatctggtgtggtagctaacatggtgggagttattgctttcctattacaacaatttgagtatcaagtttacatatccttagaggacttaagtgaacctttttcaaatcaaatcactgggggcatcacaggagtaccgctatctgtctccaagggcgatgggcgtagagtagatgtcgaaaagtatgctgggctagggctatataacttttttgagatgcagttactaaagaagctattccgtattcagcaaaacaacgagaccattttacatttagtacccgccttcagagcacagaaaaactatgatcatgtagctgtgggaaaggggaaaattaaaaatcaatttggaattgtgttttttgtggatgcaaatgcaacctcaaagacttgccctgtttgcggaacaacgaacaataatccgaacaagaaagagtatccaacagcccaaacgggaataagtcaagaaggtaaggaggtgtggatagagagggataagtctggaggtaacgacatcataagatgtttcgtgtgtggcttcgatacaaccaagaaatatacagagaaccccttgaaatatataaagtccggtgatgacaacgccgcctatctaatttcagcaaagggaataaaagcttatgaactagctatcacgttaactgacaataaa

SEQ ID NO: 127 - DNA, 3561 bp, Artificial Sequence
  Synthetic
  misc_feature: ShMmc3 codon optimized for Saccharomyces cerevisiae
atggtggcaatcgaccgtaacaaaaacaacaagatcggaggtatcatcatggaaaacaattatcaaataactaagactatcaggtttaagctagagcctgagaacgtttccttcaacgaatacgggattgggagaaacgacgaattttcattgcaatcatttgtctgcatgttaaacgattatttgggcttgtgtaacgaatttcttttctacgagaaagacggagagttcaagataaaggacaaacttattataaagaatgaatggataagaacttttcaacgttacgaatatgtccaactactagccaagaaaaaagccacaaacaataacgaccgtaggaacaacaggagggtgcaaacaaccatcggggatatccagaatctaaccgaaaagattgaaaaagtcttcgattgcgttgacgagatatatgccgatttaactaaggatgcatcggcccaactaaatgaaagagcaaagcgtgcaaggacggccttgcttttaaagagattaaaagcaaaacaggcacttccttacctaatttcccttatggaaaatatatcggataagaatgaagacaacaacttatcactaagactaaagaatgcaggccttgctttacagaagcaacttgatattgcaatacaaaagtacctaccggaacagtctggcgggttgcctatcgcaaaagcttccttcaattattatacgattaataagaagccagtggactattctttgattattaaagaacttgagaacagtctatgctttgaccttaacgacggtaaaaatatacttgacagtaagattaaggaagatgtaaaaaatagacttaacgggaaaaaattgctaatcggggacgcacctatgatttcaatagacgactacgtatccttaaggcaaatacttaaaaacattaagtccgaacaaaagaaagctttttccgagttcatgcagattaagccttctttagagacacttaggacgatgaaggacttgtatctttttaataacatttcacaagatgaatttaacgagtattattatttaacccaagatattgaggacgtcagtatcgaagtgaatcagtgcacgaacaatgagaaaaaaaaacttcttaaatctaagttgcaagcattcaaaaagaaaaggggggcattaataaatgccgccgacaataacacgaggaataaattcatagattataaaaagttcgctaccttttatagaaagatcgcccaacagcacggtagaatattagcacaacttaaaggagttgaaaaggaacaagtggagtcgcagctactaaactattgggccatgatccttgaagataataatcagtataagttagtattaatcccaagagagcgtgcatcggagtgtaaacagagggtagagagaaatcaaattacgggctctgggaaaaagttgtattggttcgaaagtttcactttcaggtcacttcgtaaactatgctttggtaacgtagagaacggtacagactccaatacgttctatccagagataagaaaggagttatccagaaagtattacactgaggataaggatgggaatagaaaattcattaaatcagaagctgacttcaagggcgacgaccaaaaaaaaatagcattttataaagatgtattgaacacgaactatgctaaacaaactttaattttcccaaaggagagagttaaaaaagatatcattaattctgaattttcgacgctagaagaattttcgattgccttagaaaagatctgctacaacagattcgtcacggtatccgaaaacatgataaacaacctttctagttacgactcgcaaatcttcgatatcaaatcattggacttgaacaatcagcttaatacccagaataaagatgagaaatacttacacaatgacaaaaaccacacgaggatttggaagtatttctgggacaataacaacgagataaacaattttgatgtgcgtttaaatcctgagatcacgataacgtacagaacacccaagcagtcaagaatagataaatacggaaaagactctcaacgtttcgactcaaataaaaacaatcgttatctacatgagcaatacaccttagtcatgacgatgtcagagcactccaatacgccaaaaaaggacctttcattcaaggcagaaaaggaatttgagaacgagatcaataacttcaacaataattttaacaacaaagaagtcaaattcgcactaggcatcgacaatggagaagtagagcttagtacactaggagtatatctacctatcttctcgcaagggtctaaagagatgataatagacgagctaaaaaaagtgaatcaatatgggtttaaaactcttactatcacggatctttcttataaggaaacggacgtcaacggcaaggacaaaagaatcatagtaaacccgagttactttcttaataaggagctttactgcaggaccttcggtaagaacaaggacgattacaaggaaatgtttgagaagcttttcgccgtaaaatacttactaacattagacttaacgacggccaaagtaataaatggtcatatcgtaaccaacggggacattcccacattcttcaatttatggttgcgtcatgcccagagatatatatatcagatgaatgataaggcaaaagatgaaacagcaaaaaagattattttgaagaaatgtaatgagcttaatgatctagagaagcgtaaattcatagacttcttaaacgtcgggaacaaaaaatataaggagcttacggacgacgagaagaactcgtacacacagtggatctaccagtattggaacggatctaacgaggagaacgatgattttaatgaagttaagcgtaagcagcgtgtgggtaattactcgtacgacgtattatttgctgtgtgctatattggtgaggacatagagaaggttatagtgatcttcgatgtgcgtaacatattcaagttgagaaaagatttctatagtattaagagtgaaaaagagatatttgaagagattgataaatacaacttaaataggactatctctgatgaggagcttgaccttaaaatggttacgttaaaacaagcactagtcgcaaatgcagtcggcgtgatagattacttatacaaacagtacaaagacagattcggtggtcacggcatcatcgtcaaggagggttttgataacggtaaggtcgagcaagaccgtgagaagtttagtggtaatatatacaggatcttagagagaaagctttaccagaagttccaaaactatggcctagtcccgcctataaagaatcttttgtctattcgtggaaaaggattaggggacaacgaaaaaaacattctacaaatcgggaacgtttgtttcgtaagtgctacgcgtacctctcagcaatgtccaatttgcgaaggtaaatttgcacagaatcacggaacgatctgtacatcctgtggttacaatatcgagaacattatgcattcaaacgacgggatagctggctataatatcgcaaagaggggattcaagaattttttaaacaacaag

SEQ ID NO: 128 - DNA, 3651 bp, Artificial Sequence
  Synthetic
  misc_feature: Smp2Mmc3 effector codon optimized for Saccharomyces cerevisiae
atggaaacgatcctatatcagagaacaagaagtatacgtttcaagcttgagcctatagaggcagaagaaatagagaaagagatcacggtaattaaaacccaggacaacgacggattggttcaggattgcatttttctagtaaacaagggaaatgaacttgctaataagctatctaagttaatttgcagagattataattgtgatgaacagaacaatatctccttaaaattgaggaaagatgtcgatgtaaagtacgtatggcttaggctatacaccaagaacgagtactacgactggtctgagccgaataacaagacgaaaatatactcgttagcagagatcccgtatttgtccgagaaatttgtgcactggtttgcttcctggaagcgtgaccttgctattttaaatgagcagattacgaagaaaactgaggagcagcacaatttgaacaggagagccgacattggtcttataatacaatctttatctaagagaaactcttttccattcattaaagagtttatcgcagcaatgaaccctaaaaacgcatctaaaattgagatcgaggaaatcgttaaagagatagatgaattattaaacaaatgtgagaagggcttccttccaacacagtccagtgggtatccaatcgcccgtgcatctttgaactactacacgatattcaaaaatccaaaagattttgataaagaaatattggagttgtccggcgaaaaattctgtaatgacaaccaaaacgagtgcgaaatcctaaaagccttttttacacactgtttcgacgtcgatgggttctgcgggatgttcttagatgtcaagaagcttgagaacatctgttcgaaattaaattccatcaaaaactaccaggagaacgataaacagcttatagccgaagctatcgataataaaataaaattgttaaacgaagagaaggacaattcaaagaaaaagaaggctaaaaaaattattgaacagttggaaaacgacaagaaaattgtttgcaatttctgggaacttcaagaaaacttctacgttcaggaaagaaattcatctaagaataataataataaatattgtctaaacaagaactactttcttatacaacagctttgtcaatctatgaaattatttaaagctcgtgagaaggcaaggtttaatgaagccgtccaaaataacaaagacttaccttacggccaattaaatcaattcttcttgttctcggctatacagatcggcaacgaaaatgataaaaggaaaacagataacgaagtcttcgatgacttcatgaagcataataaagagcttcacgatattagtgataaaatatctacgcttaagcaaaacaagaatttagatgaaaagaataaaaaggagttggacaaaatctgcactcaaaaagaccaaatagctaagtcgcgtggcaagtattttaccgatcttgatcacaacaaaacatacttttctaactatgttaagttttgcaatgtatatcgtgaagttgccttgaaagcaggacaattaaaggctcgtatcaaagggatcgagaaagagaagatagaaagtcagaggcttaaatattggtcagtgattattgaggaaaacaagaagcagtatgtcgctttcattccaaagagtaacgactatgccaagaaggcatatgagaactattccaaaatttatacaaatgataacagtataaacacgtgccagcttcactattttgagtcacttacacatagggcacttgaaaagttgtgcttttcaggtgtacaagaaagaacaaacacatttcaacctgagataaagaaggaattatcaatcgaaaagttccctaattattacgagaagggctactttatcaagggcgagtactttttcaatgacaaaaagacaggcattaaagatgagagtaaattaatacaattttataaggatgtattgaatacgcagtacgctaaatccgctttaaaaggtataccctgggagcaattaaagaagactgtattagacatccaattcgagaatttcgatggcttcaggcaagctcttgaaaagttctcatatgtgaaacatatcaaaacaaagaaggacttgttgaatgagttgtctaaggaatatgatgcacagatattcgagataacttccctagatcttaaacgtcagataaaggaagatgccaatctaaaagagcacactaagatatggatggagttttggtccgaaaacaaccaatcgaacaactatcttataagaataaaccctcagcttacaataacctggagagattcaaaggaatctagagagaaaaagtacggcgaagagacctccttgtatgacgtgaataagaataatagatttttaaaaccacaatacactatttcgtttacgataacggagaacgccacgactcaaactatgaatacggcctttaaagacgctcaaacgaaaaaggatcagatacacgagtttaacaagcagttatttcaatcctatcaacctcagtacttttttggtattgacgttggcaatattgagctagctactctatgtattatcaatccagaaaaagatttaaatgaagaaaagatgtctaaggaaagtttacagtattttgacgtttataagttgaagaaagaccagtacaatttttctaagccgtatcattttaaaacaagaaacgagacaagagagagaaaagccatcgacaacctttcttactttgctatcgaagagaattataagcagacgttcaacgacgataacttcgaggcttgtttttcggatctttttgaaaaacccgttaatacttgcgctatagacctaactactgctaaggtgcttggggacaaaatatttcttaacggggacatcaagacctatctatctttaaaggagagaaatgctcgtaggaaaatttgccagatcatagaaaagcatcccaatgccaaattacttatcaacgggaataagatcttctttcaggaatcgacctcatgcgagagaacctgtttatgtcaggaacccatctattactttaacgacaaatacgacagagaagtgcaaactctagctgatataaacaataggcttgaagactatattaaggacaaggataagtccgaactaattgaagaatccaagataaatcatttgagggccgctatcgccgcaaacatgaccggtgtaatctatcacctttttgaaaaataccaaagtttgatcgttcttgagtacttgacaatatccgacattgctagtcacaaaaagggcctaaaggccttcgagggaaatattactaggcccttacagatagctcttttcaggaaatttttgaagtcctcgctagtgccaccagccttatcggagatcatccagttaagggagaaagccaaagacaggataaccaaaattgggattatcaattttatagacaagactgctacttcagtttcttgtcctaactgcttggggaaattcgagaattataatgataacaaaaggaagggtttctgtttatgtccagattgtgggtttgacacaagaaccgacctaaagggcttcgagggattagatggcccggataaggtcgctgcattcaatatagctaagcgtggctttgaagatttacaaaaacataag

SEQ ID NO: 129 - DNA, 3696 bp, Artificial Sequence
  Synthetic
  misc_feature: SfpMmc3 effector codon optimized for Saccharomyces cerevisiae
atgcttcacgctttcacaaaccaatatcagctaagtaaaacattaaggttcggcgcaacccttaaggaggatgagaaaaaatgcaagtcgcacgaggaacttaaggggttcgttgacatttcctatgaaaatatgaaatcttcggcaaccatcgctgaatcgcttaatgagaacgagctagttaagaagtgtgaaagatgttactccgaaatagtaaagttccacaacgcttgggaaaaaatatattatcgtacagatcagatcgccgtgtataaggatttttaccgtcaactatccagaaaggctagattcgacgccggcaagcaaaattctcaacttatcactctagcatccttgtgcggaatgtatcaaggagctaaacttagtcgttatattacgaattattggaaagataatatcacccgtcaaaagtcatttttgaaagacttcagtcagcagctacaccaatatacgcgtgccttagagaaatctgataaggctcatactaaaccgaaccttatcaattttaataaaacttttatggtgctagcaaatttggtcaatgaaattgtgatcccgttatcaaacggagctatcagtttcccgaacatctcaaagttagaagacggtgaggagtcccatcttatagaattcgccctaaatgattattcgcaattatcagaattaatcggtgaactaaaagatgctatcgcaactaacgggggatacacaccgtttgcaaaagtcacactaaatcattacacagctgagcaaaaaccccatgtttttaaaaatgatatagatgctaagatccgtgagttgaagctaatcggcttggtggagactcttaaaggcaagtcctcagaacagatcgaagagtatttttccaacttagataaattttcaacttataacgataggaatcagtcagtaattgttagaactcaatgctttaagtataagccgattccttttttggtaaagcaccaattagctaaatacatcagtgagcctaatggctgggatgaggacgccgtggctaaggttttagatgccgtaggggcaattagatcgccagcacatgactacgcaaataaccaggaaggctttgatttgaaccattatccaattaaagtggcatttgattacgcttgggagcaattagcaaactcactatataccacagtgaccttcccgcaagagatgtgtgaaaaatatttaaactccatctacggctgcgaggtctctaaagagccggtcttcaaattttacgcagatctactatacataaggaaaaacttggcagtactagaacataagaataatctaccctccaaccaagaggagttcatttgtaagattaacaacacattcgaaaacatcgtgttgccctacaagattagtcaatttgaaacgtataagaaagatatccttgcttggattaatgatggacacgatcacaaaaaatacacagatgctaagcaacagttagggttcataagggggggcctaaagggacgtataaaggccgaagaggtttcacaaaaagataagtatggcaaaatcaaatcttactacgaaaacccttatacgaaacttacaaatgaattcaaacagattagttcgacatacggcaagacattcgctgaactaagggacaagtttaaggagaagaatgagattactaaaataacgcacttcgggattattatagaggataaaaatagagataggtatttgcttgcaagtgaattaaaacacgaacaaattaaccacgttagtactattcttaacaagcttgataagtcgtcggaattcatcacatatcaggtaaaatctttgacatccaagactttaataaaattgatcaagaaccataccaccaaaaagggcgcaatatcgccgtacgcagacttccatacgtcaaagacgggattcaacaagaatgaaatagaaaaaaactgggataattacaaaagagaacaggtgcttgtagagtatgtgaaggactgtttgacggattcgacgatggcaaagaatcaaaactgggccgaattcgggtggaatttcgagaagtgtaattcgtatgaggacatagagcatgaaattgaccaaaagtcctatttgcttcagagtgatacaatcagtaaacagagtatagcaagtctagtcgagggcgggtgcttgctactaccgataataaaccaagacataacaagtaaggagcgtaaggataaaaatcagtttagtaaggattggaatcatatcttcgaggggtccaaggagttcagactacatcccgaattcgcagtatcatatcgtactcccatagaaggataccctgttcaaaagagatatgggcgtctacaatttgtttgtgcctttaacgcccacatagtacctcagaatggtgagttcattaacttgaaaaagcaaatcgaaaattttaacgatgaggatgtgcaaaaaagaaacgtcacagaattcaataaaaaagtgaatcatgctctatcggataaggaatatgtcgtcatcggcatagacaggggtttgaaacagcttgcaacactttgtgtgctagataaaagaggcaaaatactaggggatttcgagatatataaaaaagaattcgtaagggctgaaaagcgttctgaaagtcattgggaacacacccaggcagaaaccagacatatattggacctttccaacttaagggttgaaaccacaatcgagggcaagaaagtacttgtggatcaatccttaactctagtgaaaaagaatagagacactcccgacgaggaggcaacagaagaaaataaacaaaagatcaagctaaaacagttatcttacatacgtaagcttcaacacaagatgcaaaccaatgagcaggatgtgttagatttgatcaacaacgaaccctcagatgaggagttcaagaaaagaatagaaggcttaatttcgtctttcggggaagggcaaaagtatgcagacttgccaatcaataccatgagggaaatgatttcagatcttcagggcgtcatagcaagagggaataaccaaacagagaagaacaaaataatagagttggacgccgccgataacttgaaacagggcattgtcgctaacatgatcgggatagtgaattatatatttgcaaaatactcttataaggcttatatatcgttggaagacctatcaagggcatacggtggtgctaaatcaggttacgatggtcgttacttaccctccacatctcaagacgaagacgttgattttaaagagcagcaaaatcaaatgcttgctggcttaggtacctaccagttttttgaaatgcagttacttaaaaaattacagaagatacagagtgacaacaccgtgctaaggttcgttcctgcctttagaagtgccgataactacaggaatatacttaggttggaggagaccaaatacaagtccaagcccttcggcgtagtccatttcatagatcctaagtttacttctaaaaaatgcccggtatgttctaaaacgaacgtttaccgtgacaaagatgacatccttgtgtgcaaagagtgcgggttcaggtccgattcacagcttaaagagagggaaaacaatatacactacatccataacggggacgacaacggagcctaccatattgccttgaaatcagtagagaaccttatccagatgaaa

SEQ ID NO: 130 - DNA, 776 bp, Saccharomyces cerevisiae
  misc_feature: OriT_region
gatcgtcttgccttgctcgtcggtgatgtacttcaccagctccgcgaagtcgctcttcttgatggagcgcatggggacgtgcttggcaatcacgcgcaccccccggccgttttagcggctaaaaaagtcatggctctgccctcgggcggaccacgcccatcatgaccttgccaagctcgtcctgcttctcttcgatcttcgccagcagggcgaggatcgtggcatcaccgaaccgcgccgtgcgcgggtcgtcggtgagccagagtttcagcaggccgcccaggcggcccaggtcgccattgatgcgggccagctcgcggacgtgctcatagtccacgacgcccgtgattttgtagccctggccgacggccagcaggtaggccgacaggctcatgccggccgccgccgccttttcctcaatcgctcttcgttcgtctggaaggcagtacaccttgataggtgggctgcccttcctggttggcttggtttcatcagccatccgcttgccctcatctgttacgccggcggtagccggccagcctcgcagagcaggattcccgttgagcaccgccaggtgcgaataagggacagtgaagaaggaacacccgctcgcgggtgggcctacttcacctatcctgcccggctgacgccgttggatacaccaaggaaagtctacacgaaccctttggcaaaatcctgtatatcgtgcgaaaaaggatggatataccgaaaaaatcgctataatgaccccgaagcagggttatgcagcggaagat

SEQ ID NO: 131 - DNA, 23 bp, Artificial Sequence
  Synthetic
  misc_feature: T1_spacer
agcaggccgcccaggcggcccag

SEQ ID NO: 132 - DNA, 23 bp, Artificial Sequence
  Synthetic
  misc_feature: T3_spacer
atcagccatccgcttgccctcat

SEQ ID NO: 133 - DNA, 200 bp, Artificial Sequence
  Synthetic
  misc_feature: Repair fragment
gccaagctcgtcctgcttctcttcgatcttcgccagcagggcgaggatcgtggcatcaccgaaccgcgccgtgcgcgggtcgtcggtgagccagagtttcctgttacgccggcggtagccggccagcctcgcagagcaggattcccgttgagcaccgccaggtgcgaataagggacagtgaagaaggaacacccgctcgc

SEQ ID NO: 134 - DNA, 20 bp, Artificial Sequence
  Synthetic
  misc_feature: Primer 1730
accacgcccatcatgacctt

SEQ ID NO: 135 - DNA, 22 bp, Artificial Sequence
  Synthetic
  misc_feature: Primer 1731
ggataggtgaagtaggcccacc

SEQ ID NO: 136 - DNA, 270 bp, Artificial Sequence
  Synthetic
  misc_feature: SNR52 Promoter
tctttgaaaagataatgtatgattatgctttcactcatatttatacagaaacttgatgttttctttcgagtatatacaaggtgattacatgtacgtttgaagtacaactctagattttgtagtgccctcttgggctagcggtaaaggtgcgcattttttcacaccctacaatgttctgttcaaaagattttggtcaaacgctgtagaagtgaaagttggtgcgcatgtttcggcgttcgaaacttctccgcagtgaaagataaatgatcg

SEQ ID NO: 137 - RNA, 35 nt, Artificial Sequence; identical to SEQ ID NO: 47
  Synthetic
  misc_feature: processed_CRISPR RNA of NoMmc3 system
  misc_feature (19)..(35): n is a, c, g, or u

SEQ ID NO: 138 - DNA, 20 bp, Artificial Sequence
  Synthetic
  misc_feature: Sup4 terminator
tttttttgttttttatgtct

SEQ ID NO: 139 - DNA, 869 bp, Artificial Sequence
  Synthetic
  misc_feature: Repair Fragment
ccttgataggtgggctgcccttcctggttggcttggtttcatgaagttagcatactccctcttgcttccattggcaggagtcagtgcttcagttatcaattacaagagagatggttctaagggtgaagaattgttcactggtgttgttccaatcttggttgaattggacggtgacgttaacggtcacaagttctctgtttctggtgaaggtgaaggtgacgctacttacggtaagttgactttgaagttcatctgtactactggtaagttgccagttccatggccaactttggttactactttcgcttacggtttgcaatgtttcgctagatacccagaccacatgaagagacacgacttcttcaagtctgctatgccagaaggttacgttcaagaaagaactatcttcttcaaggacgacggtaactacaagactagagctgaagttaagttcgaaggtgacactttggttaacagaatcgaattgaagggtatcgacttcaaggaagacggtaacatcttgggtcacaagttggaatacaactacaactctcacaacgtttacatcgttgctgacaagcaaaagaacggtatcaaggttaacttcaagatcagacacaacatcgaagacggttctgttcaattggctgaccactaccaacaaaacactccaatcggtgacggtccagttttgttgccagacaaccactacttgtctactcaatctgctttgtctaaggacccaaacgaaaagagagaccacatggttttgttggaattcgttactgctgctggtatcactcacggtatgcacgaattgtacaagtaactgttacgccggcggtagccggccagcctcgcagagcagg

SEQ ID NO: 140 - DNA, 3516 bp, Artificial Sequence
  Synthetic
  misc_feature: NoMmc3, codon optimized for mammalian cells
atgaacaatatcaagactaccaaagctatccggttcaaactggaaaatagtgccagcaacagggaaatccaggaacgcatcaataacctgagtagcaacaacggattcgatctcgtgagtttcgtgaccgaattggataactatatcgacaatctcgagaactatctgttttacaagaagggtgaatacttgtatatgaaggataaaatcatcctcaagaaagagtggatgaaaaattatggtaaacaggagctggctgagttcaaaaataagaacaataagccaaccaagggtgccagagtacagtacaaagtgggagaatacaaggtcgaattgaaaatccaggacgcctttgataatatcgatgagatctatggcgagctatgtgatgacgcaagccgtgagcttaacgagcgttctaagagaacccgcactgctttgctgcttaagcgattgtatgcaaagaacaacctgccgctgttggttgatttcgtggagaactccattagcaagaaagagctaggcaacgatagcctcatgctgaaatccatgggcaaacgtcttatggaacatctggagctagggatacaagagtacctacctgaacagtcagcaggggtctctattgctaaagcctctttcaattactatacaatcaacaagaaatccattgactacgataccaagatccaggagatcgagcgaaatctgttcgtgaataacatcgaccgcatctggaacgaccgggataacaaaatcaaggataacgataatgttaaggcagacatagcatctcgacagaataacaagcctctgtgtattggcgacagtccttttatggacgttgatgagtatgcctccctgcgacaaatactcaagaatattctaagcgagcagaaagctgattttaacaagcttatgcagcaagggggcagttacaaagagctgcagaacactgacctttacctttttaaggatattaccaaagacgagtttgacaaatacagcgagttaacagaggatatagaagaacttgccacgaagagaaatcagacaaagaatgagcagaaaaagaaggagctgaagtctcagatcgagatcctcgccaaacagcgggggtcgttcatctcagaggccgataagaccacagagaaaatgttcaagacttataaggcttttagcgtgctgtacaagaaaattgcccagaaacatggaaaagaactggcaaaactcaagggtattgaaaaggagaaagccgagagtcaaaccctccagtattgggcgatgatcttggagaaagacaatcgccacaagctggtactaatacccaaggccaaggccaatgagtgcagaagcaggctggtcgaagctgacaatgctaacggcaacatcaaattgtattggtttgagtccttcacttacagaagccttcagaaactctgcttcggcaacatcgaaaatgggagcaatactttttacccccagatccgccgtgatagcatgctgtcctctaagtacagcacacgcgaccgcaatggttactataagtttatcagtggcgagtatgagtttgccggagatgaacagcgcaaaatccagttctaccaggacgtcttgaggaccgactatgcgaagaagaatctgaatctgcctaatcgggaggtgaaggaaaagattattaacagcaccttcgagtctttggacgactttaagatagcactggaaagcatatgttaccgcagggcggtgtgcacaaatatacacctgattgacgctctggaatcggagtttggtgcccaggtctttgacattacctctctcgacctgcggcgagaagacaacataaaagacaaagaggagaagtactcgtacagctataagtcccatactgctgtgtggaaggagttctggactgccgaaaatgagaaatctaactttgacatcagactcaatccagagataagcatcatctataggaaagcaaaggaatccagaatagagaagtatggcgctgactccaagaagaacaatcgatatctgcatgatcagcttacactggtgaccacgctgtcagaacactgtaactctccagaacgtaacattgcctttgcaacgatagacgatgagaagcgcatcattgccgagttcaactccaagctggataaaaagaatatcaggtttgcctttggcattgataacggagaggtggaactcagcacacttggcgtatacctgccccagttcaagcaggattccatagaatcttctctgaaggaggtcaccaacgtcgataagtacggttttgacacacttacaattcggtctctgatgtacagcgaaaaagatgttaatggacgggaccgtaggattatcgataacccatcgtactttttgaaagaggacctgtactgccgcaccttcggaaagaatggagacgagtacaaggccatgttcgataaagttttcgagcagcggaggctgctaacgttagacctgtctaccgcaaaagtgatctgtggcaggatagtgacgaacggtgacgtgatctcattatataatttgtggatgcgccacgcccaacggaacatctacgatatgaacgagcatattgaaggcgggggggcaaaggtctacctgaagaagagcgaggttctcaatgataacgaaaagcgcaagttcttggattatcttaacgatggtaacgagaagtatgaaaagctgtccgacgccgataagaaggattatattgactggatctatcagatatgggacggaaaggaggtggaaaacaaaagatttgccaaggtgaatcgcgatcagaagaggaccggcttctacttccataatgtgttgctcgccgctagttatatcggggaagaggtacaagacgttaaagatattgccgatattgaagatattaggcacgtgttcaagttcagagaagacttcaagcagtttaaacctgagaacgagatgctggatgagattaataagtataacatcaaggttattagtaatgaagaattggacctgaaactgaatcagctgaaaagtagcctcgtcgccaacgttatcggggtcattgactatctgtataaacagtacaaagaacgctttggcggggagggaatcatcgcaaaagagggtttcggaatgagtaccgttgagggtgcccggatgaagttttctggcaacatctaccggatgttggagcgcaagctctaccagaagttccagaattacgggatggttccccctattaagaacttaactgccttccgtgaggatgatcacgccaacaagaacaaccaatacacacagatcggatatatttgcttcattgattatgctggaactagccagaggtgtcctatttgcgacacgaagctggcctacaatcacgggacggagtgtagtgcaaaatgcggattcgattccgaggggattatgcattccaatgatggaattgccggatataatattgcaaagaaggggtttgaatcaatcacaaataac

SEQ ID NO: 141 - DNA, 877 bp, Cytomegalovirus
  misc_feature: CMV promoter
acttacggtaaatggcccgcctggctgaccgcccaacgacccccgcccattgacgtcaataatgacgtatgttcccatagtaacgccaatagggactttccattgacgtcaatgggtggagtatttacggtaaactgcccacttggcagtacatcaagtgtatcatatgccaagtccgccccctattgacgtcaatgacggtaaatggcccgcctggcattatgcccagtacatgaccttacgggactttcctacttggcagtacatctacgtattagtcatcgctattaccatgctgatgcggttttggcagtacaccaatgggcgtggatagcggtttgactcacggggatttccaagtctccaccccattgacgtcaatgggagtttgttttggcaccaaaatcaacgggactttccaaaatgtcgtaataaccccgccccgttgacgcaaatgggcggtaggcgtgtacggtgggaggtctatataagcagagctcgtttagtgaaccgtcagatcgcctggagaggccatccacgctgttttgacctccatagtggacaccgggaccgatccagcctccgcggccgggaacggtgcattggaacgcggattccccgtgccaagagtgaccctggcagaactcggtaagtctgttgacatgtatgtgatgtatactaacctgcatgggacgtggatttacttgtgtatgtcagatagagtaaagattaactcttgcatgtgagcggggcatcgagatagcgataaatgagtcaggaggacggatacttatatgtgttgttatcctcctctacagtcaaacagattaagcgtctcaggggagagaccacacccaagctgtctagagccgccacc

SEQ ID NO: 142 - DNA, 3750 bp, Artificial Sequence
  Synthetic
  misc_feature: Smp2Cpf1 effector gene codon-optimized for human expression
atgaaaaccctattcgaaaattttaccaatcagtactcggtgtccaagaccctccgcttcgagctgatacctcagggcaaaactagggactttatcgaacagaaggggctcttgcagcaggacgaagatcgcgccgagaagtacaataaggtgaaaaagaccattgatgagtaccataagaactttatcgaaaagagcctgaatggccttaaacttgagggcctggagcagtataaaaccctgtacctcaaacaggagaaggacgacaaggacaagaaactgtttgataaggaaaaggagaacctgaggaagcagattgctaatgcgtttagaaataatgaaaagttcaaaacactctttgccaaggagcttatcaagaatgatcttatgaatttcgcctgcgaagaggataagaagaacgtgaaagaatttgaagccttcacgacatatttcaccggattccaccaaaatagggccaacatgtatgtagccgacgaaaagaggaccgcaattgccagccggctgatacacgagaacctgcccaagttcatcgataatatacggatcttcgagaagatgaaaaacgaagctccagaactgctcagctcattcaaccagacattgaaggacatgaaagacgtgatcaaaggcaccaccctcgaagagattttcagcctggactattttaacaaaacgttgacccagtccgggatcgacatctacaatagcgtcatcggcggtagaacccctgaagaaggcaagactaaaattaagggtctgaacgaatatattaataccgactataatcaaaagcaaaccgacaagaagaagcgccaacccaagttcaagcagctttacaagcaaatcctgtcggatcggcagtcgttgtctttcatagccggtgcttttaagaatgataccgagatcctggaggctattgagaagttctacgttaatgagctgctacacctgtccagcgaggggaagagtatcaacgttcttgacgcaactaaaaacgcagttagtaaccttgagtcattcgatctgaccaaaatctattttagaagtggagcatccctgacagatgtgagcaagaaggtgttcggcgattggtcaataatcaatcgagccctggataactactatgcaaccacataccctattaagcctcgcgagaagagtgagaaatatgaggagagaaaggagaagtggttgaaacaggatttcgacataaacttgattcagaccgccatcaaccagtatgaaaacgaaacagtcaaggagaagaactcaggaaaagttatagctgattactttgctaagttttgcgacgacaaagaaacggatctgattcagaaggtcaatgagggctacattgctgtcaaggacctgctgaatactccctacccagaaaacgagaaactggggtctaacaaagatcaggtgaaacagataaaagccttcatggattcaattatggacatcatgcactttgtccggcctctgagcttgaaagacaccgacaaggagaaagacgagacattttacagtctgtttacccctctgtatgacaggctcacacaaacaattgctttgtataacaaagtgcgcaactacttaactcagaagccttactccactgagaagattaagctgaatttcgagaacagtactctcctggggggatgggaccttaacaaggagacggataatactgccatcatactgaggaaggacaacctgtactacctcgggatcatggacaaatctcacaaccggatcttcagaaacgttcccaaggccgacaagaaggattcatgctacgagaaaatggtctataagctgctggccggtgcaaataagatgctccctaaggtattcttcagccagagcaggcggcaggagttcagtccctcagccaagctcttggagaactacaagaatgagactcataaaaagggggataattttaacctgaaccactgccacgaactgattgatttctttaaggactctataaacaagcatgaggattggaaaaatttcgacttcagattttctgccacctccgcttatgccgatctgtctgggttctaccacgaggtggaacatcagggatacaaaatcagctttcagtctgcagctgattcgtttatcgatgacctggtgaatgagggaaaactgtatctgttccagatatataacaaggactttagtcctttttcaaaaggaaagcctaacctccatacactttactggaaaatgctgtttgccgaggagaatctcaaagatgtcgtgtataagctcaacggagccgccgaaatattctacaggaaacttagcatcgcagccaagaataggacagtccataaggccaaagagattcttcagaacaagaatccggacaatccgaaggcaacgtcaaaatttgattatgacatcattaaggacaagaggtacacgctggacaaattccagttccacgttccgataactatgaacttcaaggctgaaggaatcttcaacatgaaccagcgggtcaaccaattcctgaaggccaaccctgatatcaatatcatcggtattgacaggggagaacgccacttgctgtattatacactgattaatcaaaaggggaagatccttaaacaggacaccctcaatgttatcgccaacgagaagcagaaggtggattatcataacctgctcgataaaaaggaaggggaccgcgcaacagcccgacaggagtggggtgtcatagaaacaatcaaagaattgaaagaaggatacttgtcacaagtgattcataaactcacagacttaatgattgaaaacaatgctatcattgtgatggaggatctcaacttcggttttaaaaggggccggcaaaaggtggagaaacaagtgtatcagaaatttgagaaaatgctcatcgacaagctgaactatctggtcgataagaataagaaagcaaatgaactaggcggtctgctgaacgcatttcagctcgcgaacaaattcgagtcctttcagaagatgggcaagcagaatggcttcatcttctacgtacccgcctggaacacctcaaagaccgaccctgcaactggattcatcgattttcttaaacccagatatgagaacttaaaacaggcaaaggacttcttcgagaaattcgactccatccacttcaacagcaaagctgactatttcgagttcgctttcgattttaagaactttacagaaaaagccgacggagggcggacaaagtggactgtctgtgctacaaacgaggacagatacgcctggaatcgagcgctcaacaacaatagggggggacaggaaaagtatgatataactgcagagttgaagtccctgttcgatggtaaagtcgactatcaaagcggcaaggacctgaaacaacagatagcgagtcaggagtccgccgacttcttccgcacactcatgaaatatctgtctgtgaccctttctctgcgacacaataacggtgaaaagggtgaagcggaacaggactatattctctccccggtggccgatagcatggggaaatttttcgactcacggaaggctggtgacgatatgccaaagaatgcagacgccaacggcgcgtatcatatagcgcttaagggcttatggtgtttggagcagattagcaaaacagacgacctgaagaaggttaagctcgctatctccaataaggagtggctggagtttgcccaaacactgaagggg

SEQ ID NO: 143 - DNA, 3720 bp, Artificial Sequence
  Synthetic
  misc_feature: BdMmc3 effector gene codon-optimized for human expression
atggaaaattacattaacaaatatcagataagtaaaaccctgcggtttggattaattgccaatgagagaaaggttaagaaagaaaacgaacacaagattaagcaggagaatctgtataaaagccactccgaactgaaggatctcatcgaaatatccgaaaagaacatcaagaagaatctccctaagaacgccgtgcaggcacagctccccatcaacaccataaggaaatgcattgacgaaatcaaggaacatctgaagtcttgggagcaagttcataccagatatgatcagatagcggttttaaaagatttttacagaaaactggagcgcaaggcccgatttgatgggttctggaaagataaaaaccgtgtgcgccagccccaaagccaggaaataaccctgtcctcactgaagtataagtacgagaataaggagatcaaagaccatataatcggatattgggcgaagaacatccggaagacaaaagagaaactgaatgaagtggacatcgtgctgcaacggtttgaggaggccagaaaagagaatagaacagataagatgcttaatgaggtggaactgcggaaactgttcctgagtctgacgtctctggtgaatgaggttcttggccccctcatcaggcgctcgattcaattccccaacgctgagaagttgaccgagagcaacgaagacaagaaagtcaaagaatttgcttttaacggaaagaaggagaccctcttcgattccatcattgtccttaaagcctactttcaggaaaacggtggatatgtaccctatggtagagtgactatgaacaagtttacagcactccagaaacccaacaagactgacggagaaattgacgaagtgatcaaaacactcaaactgaaggagttcctctcagagtacaaagacatcacaagtttagaccggaagctggagtcttcgaaggataagaaggatgcgctgaaagataacagcttgtcactgattgaaagggtgcaatatttcaaatacaaaacgattcccatcggggtgcaatttgcattatccgagtacctgtctaagaacgagattgagcagaagaggatttttgagttgctggagtctatcggaaaaccgaaaagtccagccaaagactacgccgacctcgaaaacaagaatgactttgacttgtacaaatatccactgaaagtggccttcgactacgcctgggagtctctggcaaaatacgaataccacaagaacatagatttccctaaggacaaatgcaaatttttcctgaaggataccttcaacttcgacaccgacaacaaggacttcaagttatacgcagaccttctctttatcagggagaacctcgctactctggactacagcaaccccaacgataagaacgtgcatatacgcaacatatcaagcgcttttgataagattgattccagacttaatcagaagcagaaatcagctacgaagaacatcttggcatggcacaaaggcaacctgtcgaaagagattgtttaccaaaatgccaagcaggagattgggagactaagaggcggcttgaagaataaggtgtcggacttcctgtctctgactaatattttcaaagaaatcgcccctgagtttggccggcagtttgccaacctgagggacaagttcaacgaagagaacgagattaataagatttcccactatggggcaatagtggaggactcaaataaggacagatacctcctgatctatcccctgaacgatgatagggacggcgtggacaccatttttccagaagacggcaaggtaggcttcaagatgtacatggcaaaaagcctcacaagcaagactctttggaaattcatctgcaatcagaaaggagttagcgaggactttcacaaaaaggataaaaagtggaacataccaaaaacccagtttggaaaggtggataaggctaagttagatgaagattataacctgaaaaatgtaatcgactgcctgcagaacagcaacatggctaaagcacagaaatggaatgagttcggatgggacttcacacactgccgaacctacagtgatattgaaaaggaagtggatcggaaggggcatctcctcaaggacaataaccatataagcatggaaaagctggaggagctgattaataaggatcgatgcctgctgctacctattgtgaatcaggacttgatccgacaggacaggattcctaaaaatcagttcacaaaggattggagcaagatattcacttctgataggagttatcgactccaccctgaattcaacgtctcatataggcacgctacacccaactatccgaaaccagaggagaaaagatacagccgattccagatgattgcacactttcagtgtgagattgtcccccaaatcgataattacattagtaaaaaggagcagataaagattttcaatgataaagagatccaaacaaatgaggtagcgaagttcaacaacaacctcatcatcagcgaggattacatgatatttggtatagatcgcggccttaagcagcttgctactttatgcgtgctggacaaaaacggaaagattcagggcgattttaagatctatactaggtactttgatactgataagaagcagtggatccacgaacttctcgagaaaaagcgcgacattttagacttaagcaatctgcgcgtcgaaactacgatcaggggggataaggtgcttgtggacctgaacgaagttgaggtgaaggagaaagacaaggaggacaaatataagaaaaaccctgacgggacatatgtgtatacaaaagagaaccagcaaaagattaagttgaagaaactggcatacattcggaaactccagtttaaaatgcagacggaatcccaaaaggttctggatttcgccaaacaaaacaccacggaacaagccgtcatcgaaaatattcagaaccttatttctccgtacaaagagggcaagaattatgatgacctccctgctgacgtcattctcaacatgttgcagcagtttaaggagtttagcgagaatgctgacacacagtccatccgggaactgatagagttggatgcgactgacaacttaaaatccggtgtggtagcaaatatgatcggcgtcatcgtgtacttgctgatggaaaagtacaacgggaaggcaattatcgcgctggaagacctgactagggccttcagtttttctaaagacggcttaaacggctatgcgctttttggaacaaattatgacgaaacagttgacttcaaggagcaagagaacctggccctggctggcaccggcacatatcagttctttgagatgcagctgctgaagaaactctttaagatcggccaagagcagaacgtgctgactgttcctgccttccggagtgtcgacaattatgagaagatcgtccggcgggacaaacaaaattccggggatgaatttgtcaactatcctttcggcattgtcacattcgtggaccccaagtttacaagcaagcgatgccccaagtgcggcaaaaccaacgtaaaccgcaaagacaacatagtgacctgcaaagacaagaattgcgggtttcaaactaaagatgggaattctttcgaggcaaacaatattcattttatcactaacggcgaccagaatggtggttatcacatagcactcaaggcactcaagaatatcaacattaaggacaaccagaacaatcatgat

SEQ ID NO: 144 - DNA, 3654 bp, Artificial Sequence
  Synthetic
  misc_feature: Smp2Mmc3 codon optimized for mammalian cells
atggagacgattctgtatcaacgtactaggtctatcaggtttaagcttgagcccattgaggctgaggagatagaaaaggagatcacagtcattaagactcaggataatgacggcctcgtgcaagattgtatatttctggtgaacaaaggcaacgaattagctaataagctgagcaagctcatatgccgggattacaattgcgatgaacaaaacaacatatcactgaagcttcggaaggatgtcgatgtcaaatatgtctggctgaggctgtacaccaaaaacgaatattacgactggagcgaacccaacaataagaccaaaatctatagccttgccgaaatcccttatctgtcagagaagtttgtgcattggttcgcatcttggaagcgcgacctagctatcctgaatgagcagatcactaaaaagaccgaggagcagcacaatctcaacaggcgcgctgacataggactcatcatccagtccctctccaagcgcaactcatttccgttcatcaaggagtttatcgcagcgatgaaccctaagaacgccagtaaaattgagatcgaagagatcgtgaaagagatcgacgaattattgaataagtgcgagaagggattcttgcccacccagagttcagggtatcctattgctcgggcctcacttaactattacactattttcaaaaaccccaaggattttgataaggagattttagagctgtcaggggaaaaattctgtaatgataaccagaacgaatgtgagattctgaaagccttcttcacacactgcttcgatgtagacggcttttgtgggatgtttctagacgttaagaaactagaaaacatttgctcaaaactcaacagcatcaagaattaccaagagaatgataagcagctaatagcagaggctattgataacaagataaagctcttgaacgaggagaaggacaatagcaaaaagaaaaaggctaagaaaattatcgagcagctcgaaaatgataagaagatcgtatgcaacttctgggagttacaggaaaacttctatgtacaggagaggaactcctctaagaacaataacaacaaatactgcctgaacaaaaactacttcctgatccagcaactgtgccagtcgatgaagctttttaaagcccgcgaaaaggcaagattcaacgaggctgttcaaaataacaaggacctgccttacggacagcttaaccagttcttcctgttcagcgccattcaaataggcaacgagaatgataaaagaaagacagataacgaagttttcgacgacttcatgaagcacaataaggagttacacgacatcagtgacaaaatctcaactttgaaacagaacaaaaatctggacgagaagaacaaaaaggaattggataaaatctgcactcaaaaggaccagatagctaaaagcagaggaaaatattttactgacttggaccataacaagacatactttagcaattacgttaagttttgcaacgtgtatagagaagtggccctcaaagctggacagctgaaggctaggatcaaaggcatcgagaaggagaaaatcgagagccagaggctgaaatattggtctgtgattatcgaagagaataagaagcagtatgtggccttcatccctaagagcaacgattatgccaaaaaggcatacgagaactactccaaaatatacactaatgacaactctatcaatacttgccaactgcattattttgagtccctgactcaccgcgcactggagaaactgtgcttttccggagttcaggagagaacaaatacctttcagcccgaaatcaagaaagaactgtcgatcgaaaagttccccaattactacgaaaaaggctacttcataaagggagagtacttcttcaacgataaaaagaccggcatcaaagacgagtctaagttgatccagttttacaaagacgtacttaacacgcagtatgccaagtctgccctgaagggaatcccatgggaacagctgaaaaagacggttctggacatccaatttgagaacttcgatggttttcgccaggcgttggagaaattttcctatgtgaaacacatcaagacaaagaaagacctgctgaacgagctctccaaggagtatgacgcccaaatcttcgaaattacctccttggacctcaaacggcagatcaaggaggatgccaacttaaaggaacacacaaagatttggatggagttctggagtgagaataaccagtccaataattaccttatcagaatcaacccacagttaaccatcacttggagagattcgaaggagtcgagagagaaaaagtatggcgaggaaacctccctctatgacgttaacaagaacaaccggttcctgaagccgcagtataccatctccttcaccatcactgaaaatgcaaccacccagactatgaacacagcttttaaagacgcccagacaaagaaggaccagattcacgagttcaacaagcagctgtttcaaagctaccagccacagtacttcttcggtatcgacgtaggtaacatagagctagccaccctgtgcataattaacccagaaaaggatctcaacgaagagaaaatgtctaaagaaagcctgcaatattttgatgtgtacaagctgaaaaaggaccagtacaactttagtaaaccttatcacttcaagactcgaaatgaaacacgggagcggaaggcgatagataatctttcatacttcgcaattgaggagaactataagcagacctttaacgatgacaattttgaagcttgctttagcgatctgtttgagaaacccgtcaacacatgcgccatcgatttgacaaccgcaaaagttctgggcgacaagattttccttaatggcgatattaagacctatctgagcctgaaagagcggaacgcaagaaggaagatatgtcagattatcgagaagcatcccaacgccaagctgctgattaatggaaacaaaattttctttcaggaatcaacaagctgcgagcgtacctgcttgtgtcaggagcccatatattatttcaatgacaagtatgatcgtgaggtccagacacttgccgatattaataatcgccttgaggactacatcaaggataaggataagtccgagctgattgaagagagcaagatcaaccaccttcgggccgccatcgcagctaacatgacaggtgtgatctaccatctcttcgagaagtaccagtccctgattgttttagaatatctgaccatctctgatatcgcatctcacaagaagggcctcaaggccttcgaggggaacataactagaccactgcagatcgctctcttcaggaagttcttgaaatccagtcttgttcctcccgccttatccgaaataatccagctccgcgagaaagccaaggaccggatcacaaagattgggatcattaatttcatagataagacagccaccagcgtgagctgcccgaactgcctcgggaagttcgagaactataatgacaacaaaaggaaagggttttgcctgtgcccggactgcggatttgatacaagaacggatctcaagggatttgagggccttgatggacccgataaagtggccgctttcaacatcgcgaaaagggggtttgaggacctgcaaaagcacaagtaa

SEQ ID NO: 145 - DNA, 3891 bp, Artificial Sequence
  Synthetic
  misc_feature: SfMmc3 effector gene codon-optimized for human expression
atggagaatattaagaatggctaccagttgtctaaaaccttacgcttcggcctaactcagaagtgcaagaagcgacgtaagaattacgagggagaaatctacgaatcacacaaggagctgaacgatcttatcatgttttcagaggaacgaatcaaacagagtctatcaatcgataagaaatccgaattacaattttctattaataacatcgaaaaatgcctcctccttgtcgataatttctttttctcttggcaacaagtatatcagagagacgatcaaatagcccttgacaaagactactataagattttgtgcaagaaaattggctttaacggcttttggacggagagaagaagagagcaaagggtgaagaagccacaaagtcgcgttatatccctttccgaactcaagaaacctgacgagctgggaaagaagcggttccagtatatattagattattggcgtgagaatctcctgaacgttgccgagaaatacaatgtggtttctgagaaacttaagcagtttcaagatgccctaaaaatcaacagaacagataataagcccaatgaggtggaactgaggaagagttttctgtctctccttcacctggttaatgacaccctgatgcccctgtgttatgggcagattctgttccctaagatcgagaagctggactcatctaagtcccataaccagaaactgattgaatttgccacagaccatcagtcaaaaagcgatctactttcagagataactgagatcaaaaagtactttgaggaaaatggcggcaacgtgcctttctgtcgtgctactctgaatcctaacacagctatcaaaaacccgaagtccagcgataacaagatagaggaagagatcaacataatcgggctgtccaacatactgaaggaacataagtcagtgctgttttacgacaaatacctggaagatctgagtgtgaaagagaagatcaatctgctcaaaaacaaggactcgaacagcataacccggagtcttatgttcaaatgtaagagcgtaccagcgatagtgcagtatgaaattgccaaaacgctgtcaagaaagctagacaagtcagaggaagacattagaaacttcctcaggggcatcggtcaggcgaagtctcctgctaaggactatgccgatctacagaataagaacgatttcaacatcgaggcatatccactgaaggtcgcatttgattttgcctgggaaggcttggcacgtagcatctaccatcccgatgcatcgttcccacttgaacagtgtcgtcgcttcctcaatgacaattttggcgtgaataaggaagacaataacttccagctgtacgccaaactgcaggaactgcgagactacctctccgtgttggagcacaataagcttaaagacggcaccgctcagatcaacgcggctagggaaattattgagtctttagattggcagaagaattttggcgatcggggaaacggatacaagcggtctattaccgtttggttgaacaagtggaaaccaaacttacaggataatgacgatacagacttcaaaacagcgaaacagcagataggacttttccgcggctctctgaagaacaaaattaagaagtactatgaaattacacagacatacaaggacatcgcaatgcaaaccggtagaacattcgccaagatgagagacaaaatttcaggggccgccgagctgaacaaagtgtctcactacgccatgatcatcgaggattcaaatgctgacaagtacgtcttactgcaggaattcacagagaagaaaggagaccggatctacgctaagactgattacaacaacggggatatcacagcctatgcggtgaactccgtgacatctggtgctattgctaaaatgataaagaagaagcggttggacagtttcaacgacaagtacggggagagcacatttcagcagcaagaactgactaaggaacagaaggagcagaaaaacatcagagagtggaaaagcttcatagaagagaaacgctgggatctcgaattcaaactcaacactaaggtgaaaacttttgaacagctgaaaaaggagattgacagcaaatgttacgaacttaacaagaaatacatctcaagggacgtcctcgacgacctgatcaataacaagaactgcctactgctgcccattgtttcacaagacctggccaaaaaggagaaaagtgagatcaatcagttcacaaaagactggaatgccgtatttgctcagaataccccatggcgattgactcctgagtttaggataagttacagaaaacctactcctaactaccctgagtccgacaagggagataagcggtacagtcgttttcaaatgattgggcatttcctctgcgattatattccgaaaaatgactactatattagtactagagagcaaatcgctatctataaagacgataaacagcaggagaccgccgtgaaccgatttcatgacaagctaaaaggcagaactgaagccgaggagcatgttgactccatcaacgctctgatcgctaagtttggctcagtgaacaagaagcagaagtctatagttgttgataaaccaaaagaagagttctacgtatttggtattgaccgcggccagaaggaactggccaccctttgcgtgatcgaccacaacaagaagataatcggaaactttgacatctacgtgaggtctttcaacagcatttccaaacagtgggagcacaagtttctggagaagaggcacatcctggatctgagcaatttgagagtggagactacattgttcatcgacgggaagcctgagaagcgaaaggttcttgttgacctgtctgaggtgaaggtgaaagataaaaatggcaatttcaccaaaccagataagatgcagatcaagatgcagcagctggcctacatcaggaagcttcagttccagatgcagactaatcccgatgtcgtgcttgcatggtatgagaagaattccactaaggagatgatgttgaagaacttcgtgaaaaagtctgacgatgataacaatggtctcgtgagtttttacggcgccgcagtcgaggagctcgaaaacactctccccatcgagcggatctcagagatgcttcagaagtttgacctgttgaagaagcaagagaaggagggcgaagatattaagcttcagatcgataagttagtgcaattagaccccgtggacaacttaaaatccggtgtggtcgctaacatggtaggcgtcattgcctttctccttcagcagttcgagtatcaggtttacatcagcttggaggatctcagtgagccctttagcaatcagattactggaggtattactggcgttcctctatctgtgtctaagggcgatgggcgccgggttgacgttgaaaagtatgcgggattgggtctatacaactttttcgagatgcagctgttaaagaagctgtttcgcattcagcagaacaacgagactattttgcaccttgtacccgctttcagagcacagaagaattacgaccacgttgcagtcgggaaggggaaaatcaaaaatcaatttggtatcgtcttcttcgttgacgctaacgccacctcaaaaacatgccctgtgtgcggcaccacaaacaacaatcctaataagaaagaatatcccaccgcccaaaccggtataagtcaagagggcaaggaggtgtggatcgagagagacaaatccggggggaacgacatcataagatgtttcgtctgtgggttcgatacaacaaagaaatatactgagaaccctctgaagtacatcaagtctggcgacgataacgctgcctatctaatatccgcaaagggcatcaaagcttacgaactcgcaatcactttgaccgacaacaag

SEQ ID NO: 146 - DNA, 3561 bp, Artificial Sequence
  Synthetic
  misc_feature: ShMmc3 effector gene codon-optimized for human expression
atggtggcaatcgatcggaacaagaataacaagattggcggaatcatcatggaaaataactaccaaatcacaaaaactatccggttcaaactggagccagaaaatgtctcattcaacgagtatggaatcggtcgtaatgatgagttttcacttcagagtttcgtgtgtatgttgaatgactacctcggattgtgcaacgaatttctgttttacgaaaaagacggcgagttcaagattaaggacaagctgattattaagaacgagtggattcgcacttttcagcgatacgaatacgtccagctactggcaaagaaaaaggcaacgaataacaatgaccgcagaaataaccgccgggtacaaacaaccatcggggatatccagaacttgacagagaagatcgaaaaagtattcgactgcgtggacgaaatatacgctgacctgaccaaggatgcttctgcccaactcaacgagcgggccaagagagccagaacagccttgttactgaaaagactgaaggccaagcaagccctcccatacctcatctctctcatggagaacatttcagataaaaatgaagacaacaacctatctctgaggcttaagaatgctggactcgcactccagaagcagcttgatatcgccatacagaaatacctccctgaacagtcgggaggccttcctatcgccaaagcgtccttcaactactataccatcaacaagaaacccgtggactattcactcataatcaaggaactggagaacagcctgtgcttcgacttaaacgatggcaagaatattctggactccaaaatcaaggaagacgtcaaaaacagactaaacggaaagaagctcctgatcggagacgcaccgatgatatccatcgatgactacgtgtccttgcggcagattttgaagaacattaagtcagaacagaagaaggcgttcagtgagtttatgcaaattaagccttccctggagaccttacggaccatgaaagacttgtacctattcaacaatataagccaggatgaattcaatgaatactactatctgacacaggatatagaggatgtttctatcgaggtcaatcagtgtacgaataatgagaagaagaagctgctcaaaagtaagcttcaggctttcaaaaagaagagaggggccctcatcaacgctgctgacaataatacccgaaacaagttcatcgactacaagaaattcgcgactttttacaggaaaatcgcacagcagcatgggagaatcctcgctcagctgaagggcgtcgaaaaagagcaggtggagtcccaactcctaaactactgggccatgatcctggaagacaataatcagtacaaacttgtgctgatcccccgggagagagcatctgaatgcaagcaacgggtggaaagaaaccaaattactggtagtggcaaaaagttatactggttcgagtcttttacattccggtctctcaggaaactgtgttttggaaatgtcgaaaacggcaccgatagcaacacgttctaccctgaaattagaaaagagctatctaggaagtactacactgaggacaaggacggtaatcgaaagttcatcaagagtgaagccgattttaaaggagacgatcagaaaaagattgcattctataaggacgtgctcaatactaactacgccaaacaaacattaattttccccaaggagcgtgtcaagaaagatataattaatagcgagtttagcacactggaagagtttagtatcgctctggagaaaatctgttacaatcgattcgttaccgtgtctgagaacatgataaacaacctgagttcctatgattcccagatatttgatattaagtccctggatctgaataaccagttgaacacacaaaacaaagatgaaaagtacctacacaatgacaaaaaccacaccaggatctggaagtatttttgggataataataatgagattaacaatttcgatgtccgcctcaaccccgagattacaatcacataccggactccaaagcagagcagaattgacaagtacggcaaggatagccagcgctttgactccaacaagaataatcgctacctgcacgagcagtacacattggttatgaccatgagcgagcatagcaatactccaaagaaggacctttccttcaaggccgagaaggagttcgaaaacgagatcaataacttcaacaacaatttcaataacaaagaggtcaagttcgcgcttgggatcgataacggagaggtggagctttcaaccttgggcgtgtacctcccaatattttctcagggaagtaaggagatgatcatcgacgaactgaagaaggtgaatcagtacggcttcaaaactctcaccatcacggacttgtcttacaaggagaccgatgtcaacggcaaagacaaaaggattattgtgaatccgagttattttctcaacaaagagctgtactgtcgaacttttgggaagaacaaagacgattacaaggaaatgtttgaaaagctcttcgctgtcaagtatcttctgacactggacctcacgactgctaaagtaattaacggacatattgtcactaatggcgatattcctactttctttaacctctggctgcgccacgctcaacgctatatatatcaaatgaatgataaggctaaggacgaaaccgctaagaagattatcctcaagaagtgtaacgagctgaacgacctggagaaaaggaaattcattgacttcctgaacgttggcaacaagaaatacaaggaactgactgatgacgaaaagaacagctatacccaatggatctaccagtattggaatggcagcaacgaagagaatgacgatttcaatgaggtcaagcgtaaacaaagggtggggaattactcctacgacgtattgtttgccgtgtgctatattggcgaagatatcgaaaaggtaattgtgattttcgatgtcagaaatatcttcaaactgagaaaagacttctatagtatcaaatccgaaaaggagattttcgaagaaatcgataagtacaacttaaacaggacaataagcgacgaagaactggatctcaaaatggtgacgcttaaacaggctctcgtggcaaatgctgtcggagtcatagattatttgtataaacagtacaaagataggttcggtgggcacggaattatagtcaaggagggattcgataatggcaaagtggaacaagatcgagagaaattttcggggaacatctaccgcatattagagaggaaactgtaccagaaatttcagaattatggcttggtgccaccaatcaagaatttgctatctattcgtgggaaaggactgggggacaacgagaaaaacattctacagataggaaacgtctgttttgtctccgccactcgcacaagccagcaatgtccgatctgcgaggggaaatttgcccagaatcacggcacaatctgtacaagttgcggctacaacattgagaatatcatgcacagcaatgacggcatcgcaggttacaatatcgcaaagcgaggttttaagaacttccttaacaacaaa

SEQ ID NO: 147 - DNA, 63 bp, Artificial Sequence
  Synthetic
  misc_feature: Encodes 2A self-cleaving polypeptide
ggcacatctgagggcaggggaagtctgctaacatgcggggacgtggaggaaaatcccggcccc

SEQ ID NO: 148 - protein, 45 aa, Artificial Sequence
  Synthetic
  misc_feature: NLS-linker-HA tag
KRPAATKKAGQAKKKKGSYPYDVPDYAYPYDVPDYAYPYDVPDYA

SEQ ID NO: 149 - DNA, 265 bp, Homo sapiens
  misc_feature: HuU6 promoter
aaggtcgggcaggaagagggcctatttcccatgattccttcatatttgcatatacgatacaaggctgttagagagataattagaattaatttgactgtaaacacaaagatattagtacaaaatacgtgacgtagaaagtaataatttcttgggtagtttgcagttttaaaattatgttttaaaatggactatcatatgcttaccgtaacttgaaagtatttcgatttcttggctttatatatcttgtggaaaggacgaaacaccg

SEQ ID NO: 150 - DNA, 28 bp, Artificial Sequence
  Synthetic
  misc_feature: CD46_540sp spacer sequence
cacttataatctactcgttcaccaatct

SEQ ID NO: 151 - DNA, 28 bp, Artificial Sequence
  Synthetic
  misc_feature: CD46_541sp
ccaatgagctccatagcttcaaatgttg

SEQ ID NO: 152 - DNA, 1179 bp, Homo sapiens
  misc_feature: CD46_exon1
atggagcctcccggccgccgcgagtgtccctttccttcctggcgctttcctgggttgcttctggcggccatggtgttgctgctgtactccttctccgatgcctgtgaggagccaccaacatttgaagctatggagctcattggtaaaccaaaaccctactatgagattggtgaacgagtagattataagtgtaaaaaaggatacttctatatacctcctcttgccacccatactatttgtgatcggaatcatacatggctacctgtctcagatgacgcctgttatagagaaacatgtccatatatacgggatcctttaaatggccaagcagtccctgcaaatgggacttacgagtttggttatcagatgcactttatttgtaatgagggttattacttaattggtgaagaaattctatattgtgaacttaaaggatcagtagcaatttggagcggtaagcccccaatatgtgaaaaggttttgtgtacaccacctccaaaaataaaaaatggaaaacacacctttagtgaagtagaagtatttgagtatcttgatgcagtaacttatagttgtgatcctgcacctggaccagatccattttcacttattggagagagcacgatttattgtggtgacaattcagtgtggagtcgtgctgctccagagtgtaaagtggtcaaatgtcgatttccagtagtcgaaaatggaaaacagatatcaggatttggaaaaaaattttactacaaagcaacagttatgtttgaatgcgataagggtttttacctcgatggcagcgacacaattgtctgtgacagtaacagtacttgggatcccccagttccaaagtgtcttaaagtgctgcctccatctagtacaaaacctccagctttgagtcattcagtgtcgacttcttccactacaaaatctccagcgtccagtgcctcaggtcctaggcctacttacaagcctccagtctcaaattatccaggatatcctaaacctgaggaaggaatacttgacagtttggatgtttgggtcattgctgtgattgttattgccatagttgttggagttgcagtaatttgtgttgtcccgtacagatatcttcaaaggaggaagaagaaaggcacatacctaactgatgagacccacagagaagtaaaatttacttctctctga

SEQ ID NO: 153 - DNA, 6 bp, Homo sapiens
  misc_feature: U6_terminator
tttttt

SEQ ID NO: 154 - DNA, 136 bp, Artificial Sequence
  Synthetic
  misc_feature: NoMmc3 crRNA expression cassette for human cell lines
tgtctataaagacgttttaatttctactattgtagatcacttataatctactcgttcaccaatcttgtctataaagacgttttaatttctactattgtagatccaatgagctccatagcttcaaatgttgtttttt

SEQ ID NO: 155 - DNA, 134 bp, Artificial Sequence
  Synthetic
  misc_feature: BdMmc3 crRNA expression cassette for human cell lines
ggctaacggcctttttaaatttctactattgtagatcacttataatctactcgttcaccaatctggctaacggcctttttaaatttctactattgtagatccaatgagctccatagcttcaaatgttgtttttt

SEQ ID NO: 156 - DNA, 134 bp, Artificial Sequence
  Synthetic
  misc_feature: Smp2Mmc3 crRNA expression cassette for human cell lines
gtctgacagacagattgaatttctactattgtagatcacttataatctactcgttcaccaatctgtctgacagacagattgaatttctactattgtagatccaatgagctccatagcttcaaatgttgtttttt

SEQ ID NO: 157 - DNA, 134 bp, Artificial Sequence
  Synthetic
  misc_feature: SfMmc3 crRNA expression cassette for human cell lines
gtctataaagaccaaataatttctactattgtagatcacttataatctactcgttcaccaatctgtctataaagaccaaataatttctactattgtagatccaatgagctccatagcttcaaatgttgtttttt

SEQ ID NO: 158 - DNA, 134 bp, Artificial Sequence
  Synthetic
  misc_feature: SvMmc3 crRNA expression cassette for human cell lines
ctctatagagagcattagatttctactgttgtagatcacttataatctactcgttcaccaatctctctatagagagcattagatttctactgttgtagatccaatgagctccatagcttcaaatgttgtttttt

SEQ ID NO: 159 - DNA, 52 bp, Artificial Sequence
  Synthetic
  misc_feature: CD46-F1 primer
tcgtcggcagcgtcagatgtgtataagagacaggctgccagaccacagtcca

SEQ ID NO: 160 - DNA, 57 bp, Artificial Sequence
  Synthetic
  misc_feature: CD46-R1 primer
gtctcgtgggctcggagatgtgtataagagacagtatgggtggcaagaggaggtata

SEQ ID NO: 161 - DNA, 3723 bp, Artificial Sequence
  Synthetic
  misc_feature: BdMmc3 effector gene codon-optimized for Oryza sativa
atggagaattacattaacaagtaccagatctctaaaacgctgcgctttggactgattgccaacgagaggaaggttaagaaagagaacgagcacaagatcaagcaggaaaacctttacaagtctcactcagagctcaaagacttgatagaaatatcggaaaagaacatcaaaaagaacctccctaagaacgcggtccaagcgcaactcccaatcaacacgatccgcaagtgcatcgatgagattaaggagcatttgaagtcttgggagcaggttcacactcgctacgaccagatagccgttcttaaagacttctatcgcaaactcgagcgcaaggcccgctttgacggcttctggaaggacaaaaacagggtacggcaacctcagtctcaggagattaccctaagcagtttaaaatacaagtacgagaacaaagagattaaggaccatatcataggctactgggctaagaatattaggaaaacaaaagaaaagctcaacgaagtcgatatcgtgttacagagattcgaggaggcccgcaaggagaatcgaactgataagatgttgaatgaggttgagttgcggaagctcttcctcagtctgacgtccctcgttaatgaggtgctgggaccgttgatccgacgtagtatccaattcccaaacgcggaaaaattgacagagtctaacgaggacaaaaaggtcaaagagttcgcctttaacggcaaaaaggaaaccctcttcgacagtatcatcgtgctgaaggcgtactttcaggaaaacggcggttacgtcccttatgggcgggtgacgatgaacaagtttaccgctctgcaaaaacctaacaagaccgacggtgagatcgacgaggttattaagaccctgaagctgaaggagtttctctctgagtacaaggacatcacatccctagacaggaagctcgagtcgtctaaagacaaaaaagacgctcttaaggacaatagcctatctctgattgagcgcgtccagtacttcaaatacaagacgatcccaattggagtgcagtttgcgctctcagaatacctctccaagaacgagatcgagcaaaagaggatatttgaactgttagagagcatcggaaaaccgaagtccccagctaaggattacgcggatcttgagaataagaacgattttgacctctacaaataccccctaaaagtggccttcgactacgcctgggaatcactggcaaaatatgaataccacaagaatatcgactttccgaaagataagtgcaagttctttctcaaggacaccttcaatttcgacacggataacaaagatttcaagctgtatgcagacctcttgttcatcagggagaaccttgccactcttgactactcgaaccctaacgataagaatgtacacattcggaacatctcatcggcgttcgacaagatcgactcccgattgaatcaaaagcagaagtccgcaaccaagaatattctggcttggcacaaggggaacctttctaaagagatagtttaccagaacgccaagcaagagatcgggcggctccggggagggctgaagaacaaagtgtcggatttcctttccctgaccaatattttcaaagaaatcgcccctgaatttgggcgccagttcgctaatcttcgagataagtttaacgaggagaacgagatcaacaagataagccactacggtgcgatcgttgaggacagcaacaaggatcggtatctgctcatctatcccctcaacgacgacagggacggcgttgacaccatcttcccggaagatgggaaggtgggattcaagatgtatatggcgaagagcttgacttcgaagacgctctggaagtttatctgtaaccaaaagggggtttcagaagattttcacaagaaagacaagaagtggaacattcctaagacacagtttgggaaggtggacaaagcgaagctcgacgaagattacaatcttaagaacgtgatcgactgtctacaaaactctaacatggctaaagcgcagaagtggaacgaatttggctgggacttcacgcattgcaggacatactcagacatcgagaaggaagttgaccgaaagggccacttgctcaaggataataaccacatcagtatggaaaaattggaggaactcatcaacaaagatcgttgcctcctcctcccgattgtcaaccaggacttaattcgccaggataggataccgaagaaccaattcactaaggactggtcgaaaattttcacctccgatcggtcttatcgccttcatcctgagtttaacgtatcctacagacatgcgacaccaaactaccctaaacccgaggagaaaagatactcacggttccaaatgattgcgcactttcaatgcgagattgtgccccaaatcgataattacatcagcaagaaggagcagataaagattttcaacgacaaggagattcagacaaacgaggtggcgaaattcaacaacaacctgataatctctgaagactatatgatttttggtatcgatcggggactcaaacagttggcaacgctctgtgtcttagacaaaaacgggaaaatccagggagatttcaagatctatacgcgctacttcgacactgataaaaagcagtggattcacgagctgctggagaagaagcgcgatatcctcgacctgtctaatctccgcgttgagactacgattaggggcgataaggtcctggtggacctaaacgaggtggaagtgaaggagaaggacaaggaggacaagtacaaaaagaatcctgacggcacatacgtgtatacgaaggagaatcagcaaaagataaagctgaagaaattggcctacatccgcaagctccagtttaagatgcagaccgagagtcaaaaggtccttgacttcgccaagcaaaatacgacggagcaagctgtgatcgagaacatccagaatctcatctccccttacaaggagggaaaaaactacgatgacctccctgcggatgtcatcctcaatatgctacaacaattcaaggagttctcggagaatgcggacactcagtccatcagggagctcattgaactggacgctactgataacctgaagtccggagtagtcgccaatatgattggggtcatcgtgtacctactgatggagaaatataacgggaaggccatcatagcgttggaggatctcacaagggcgttcagtttctctaaggatggcctcaatgggtatgcattgttcggaactaactacgacgagacggtggatttcaaggagcaagagaatctcgcactggccggaacaggcacctatcagttcttcgagatgcaattactgaagaaactcttcaaaataggacaagagcaaaacgtgttgaccgtccctgcgttcaggtcggtcgataactacgagaagatcgtaaggcgagacaaacaaaactcaggtgacgagtttgtcaattacccattcgggatcgtgacattcgtggaccctaagttcacctccaagaggtgtccaaagtgcggaaaaacgaacgtaaaccgcaaggacaacatcgtgacgtgcaaggataaaaactgcggtttccaaaccaaagatggaaattcgttcgaggcgaataacattcactttatcactaacggagatcaaaacggaggctaccatatcgccttgaaagcgttgaagaacataaacattaaggataatcaaaacaatcacgattaa

SEQ ID NO: 162 - DNA, 3519 bp, Artificial Sequence
  Synthetic
  misc_feature: NoMmc3 effector gene codon-optimized for Oryza sativa
atgaacaatatcaagacaaccaaggccattcgcttcaaattggagaactcggcaagtaatcgggagatacaagagcgcatcaacaatctgtcaagtaacaacgggtttgacttagtgtcattcgttactgagctcgataactacatcgacaacctggagaattacttgttctacaagaagggggagtatctctacatgaaggacaagattatcctcaagaaggagtggatgaagaactacgggaagcaagagctggctgagttcaaaaacaagaataacaagccgacaaaaggcgcgcgggttcaatacaaggttggggagtataaggtagagctcaagattcaggacgccttcgataatatcgacgaaatctacggcgaactgtgtgatgatgcgtccagagaacttaacgagcgatccaagcgcactcgcacggccttgttactgaagaggttgtacgctaagaacaatcttccgcttctggttgatttcgtcgagaactctatctcaaagaaagaactgggtaatgactctctcatgttaaagagcatgggcaaaagactcatggaacaccttgagttgggaatccaggagtatctaccagagcagtctgcgggagtgtcaatcgcaaaagcatcttttaactactacacgattaacaagaagtctattgattatgatacaaagattcaagaaatagagcgcaacttgtttgtgaacaatatcgatcggatctggaacgaccgtgataacaagatcaaggataacgataacgtgaaggctgacatcgccagtcgccagaacaacaaacctctttgcattggcgattcgccctttatggatgtggacgaatacgcatcactacgacagatcctgaaaaacatattatcagagcaaaaagctgacttcaataagctcatgcaacagggaggatcgtataaggagttgcagaacacagacctgtacctcttcaaggacataactaaggatgagttcgataagtactccgaattgacggaggacatagaagagcttgcgacaaagcgcaatcagaccaagaatgagcagaaaaagaaagagttgaaatcccaaatagaaatactagctaagcaacgaggctccttcatatcggaggctgacaagactacggagaaaatgttcaagacatacaaggcgttctcggttctatataagaagatcgcccagaagcacgggaaggaacttgccaagttgaaaggaatcgagaaagagaaagccgaaagccaaaccctgcagtattgggccatgatactcgagaaggacaaccggcacaagctcgtcttgatcccgaaggccaaagctaacgagtgccgttctcgccttgtcgaggcggacaacgcgaacgggaacatcaagctctattggttcgagtcgttcacctatcgctcacttcaaaagttgtgctttggcaatatcgagaatgggagcaataccttctacccacagattcgccgcgatagcatgctctcatcgaagtactccaccagggatcgcaatgggtattacaagttcatatccggagagtatgagttcgcgggagatgaacagcggaagatacagttctatcaagatgtcctcaggaccgattacgccaagaagaatctcaacctgccgaaccgtgaagttaaagagaagataatcaacagcactttcgagtcactcgacgattttaagatcgcattggagtcaatctgctatagaagggccgtgtgcacgaacatacatctgatcgacgccctggagtccgagttcggggcccaagtgtttgacatcacttcgctggatttgcgcagggaggataacataaaggacaaggaggagaagtactcctactcctacaaatcccacacagcggtttggaaggagttttggacggccgagaatgagaagtcaaatttcgacatccgactgaatcctgagatctcgattatctaccgcaaagcaaaggagtcaagaattgagaagtatggagcggattcgaagaagaacaaccgatatctacacgaccaactaactcttgtcacaacactgagcgagcactgcaactcccctgagcgcaacattgcgttcgccactattgacgacgagaagaggatcatagcggagttcaactccaaactcgataagaagaatatcaggttcgctttcgggattgataatggcgaggtcgagcttagtacactcggcgtttacttgccacagtttaagcaagattcgatcgagtcgtcattgaaagaagttacgaacgttgacaagtatggcttcgatacgctgacgatcagaagtttgatgtattcggagaaggacgtgaatgggcgcgatcgccggatcatcgacaacccctcttacttcctcaaggaagatttgtactgtcgcactttcggaaagaacggcgacgaatacaaagcgatgtttgataaagtttttgaacaaagacgcttgctcaccctggacttgtcaacagccaaggttatatgcggtcgcattgtcaccaatggcgacgtcatcagcctctacaacctttggatgagacacgcacaacgaaacatatacgatatgaacgagcatatcgaaggtggtggtgcaaaggtgtacttgaaaaagagtgaagtgctcaatgataacgaaaagcgaaagttcttggattacttgaatgacggcaatgagaaatatgaaaagttaagcgacgcagacaaaaaggactacattgactggatatatcagatttgggacgggaaggaggtcgaaaacaagcggttcgcgaaagtgaaccgggaccagaagagaacaggcttctatttccataatgtcttgctagcggcatcctacattggtgaggaagttcaggacgtcaaggatatcgctgatatcgaggacatccggcacgtttttaagtttcgcgaagactttaaacagtttaagcctgaaaacgagatgcttgacgagatcaacaaatacaacattaaggttatttctaacgaagaactggatctcaagctcaatcaactaaaaagctccttggtcgccaacgtgataggagtgatcgactacctatacaagcaatacaaggaacgcttcggcggggaggggattatcgccaaggaggggttcggtatgagtaccgtcgagggtgcgcggatgaagttcagtggcaatatctatcgaatgttggagcgcaagctctatcagaagtttcagaactatggcatggtccccccgataaagaaccttactgccttccgagaggacgatcatgcaaataagaacaaccagtacacacagatcggctacatctgcttcatcgattatgcgggcacatcccaacgctgtcctatttgtgacacaaaacttgcttataaccacggtacagagtgcagtgccaaatgtggcttcgacagtgaggggatcatgcatagtaatgatgggatagcaggctacaatatcgcaaagaaggggttcgagtcgataacgaataactaa

SEQ ID NO: 163 - DNA, 3102 bp, Artificial Sequence
  Synthetic
  misc_feature: Nap Mmc3 effector gene codon-optimized for Oryza sativa
atggagaactcaaacctataccaagtggttaagacaatacggtttaaactcgaacccgtggggaagatggacacaccaaagtttggggataagaacgcagaaagtaaggccaatctgacgccattcatcgagttggtcaagaaaacaatgaccaacgtcaaagccctcgtgttctcgaagcaagacggagaggatggcgaaaagtggcggaaaatccttgaggtcaattatagatttctgagaagctaccttaagaacagtttctatgagaaccgcggcgactcacaggagaagtctaaaaaacacaagatcagtgacctggagtacttgcaaaaggccctggagaaccttttcgcggagttcgatgagattcttgatggtctggaggactttgagaaacgcaacaccaaaaaccagtacgagaaacagcggcatgcccaggcagggttgctacttaacaggctctgcaagcggtctaacttcggcttcctgaaagccttcgttggcgccctggcgcagaccaacaagccgttttttgatgataagaccgacaaactcaagaagcaaatagataagttcgagacagagctggagaagcagaaagaattttttcttccgtaccagtctaacggtgtccttttcgccggtggtagcttcaatcggtacgccattaataagacccctaagatgttagataaagaactgagagaagaacagacaaacttgaagaagtctttgtgtgagcataagatcaaaattgatacactcaatacactcgggctaaaaaatgactgcccttgtacctcattggacaactcttacaccttcatcaaggattataaggctaagcaaaaatctaagtttatcgaacttgtgcagaagggcgagtttgacgaggctaaaaaggtgaacttgtttgagtgttcggagactgatttcgagacgttcaagacgcgtaccaaacaaattcagaatgagaaggataaagacgagagaacgaagctgaagcagaaaaggggcgaatttttcaagtcccagaagcggggcaagttctttaagtctcagacacagaattatgaaaatctctgtgatctgtacaagaaaatcgcccagaagcgcgggcaaatcgtggcgaagatttgtgccataaaaaaggagaaggagatgtgcgagcaggtgaaatactggtgcgtcgccctcgagaagggtggggagttctacctttacatgtttctgagggatgagaatgacaatattaagaacgcttacgacttcgtgagcaaactccagactcagaagagtggagaaacaaagttgcactatttcgattctctgactctgaaggcagttcgcaagttatgctttaaggagactgatggttcctttaaaaaggccctgaagaacgtgaaattccctgaatgcgaacagaatcttgacgaaaaggtgaagatatctttctaccagaatgtgctaaagaatgcaaagacgttaaacttgtccaagtttgaaaatctacagtcggtgactgagggcaagttcgagtctctgagcgagtttgaggtcgccctgaacatggtttgttacaccaaaacggtgtgcgtctcagagtcggttgagaaggaactcaagaagtttaagcccctggtttttcacattacatcccaggacttggcagccaagcgcgagaaaaaggcccatacccaaatctggcacgagttctggagagaatcaaacgagaagtccaaatttccactgcgcctcaaccctgaactgaaggtaatgtggcgtgaggcaagacccagtagggttgagaagtatgctgaacagtccgacaagttcgacccgaacaagaagaacagatacctgcacccccaattcacgctagcacttaacttcactcagaacgcgcacaatgaggcgattaatctcgcgttcaaagacgtccaaaacaaaggcgaagccgttaagaagttcaatgagaacttcaagtcctccgagtacgcattcggcatagacgtgggcacgaaggacctcgcactgctgtgcctcattgataagaataagaaaccggtgaatttcgatgtttacgagatttgtaacgagaatgagatctgcaacgaaaagctcggatttgagaagttcggattctacaaagacggaaccaggagggacgagccatacaaactcatcaagaatccaagttacttcctcaacgaatcgttgtacaagaagacgtttaacgctaccaaggaagagttcgaacggagcttcagtgaactgtttaagcgcaaaagtgtgtgtgcactggacctcaccacggcaaaagttatctgcggaaagattatcctgaacggagatttttctacacatctcaatctgaaaatcttgaatgccaagaggaagatctccgccaagttgaagaaggaccccacactcaagattgagtacgacaacgatgataatatccttttcggcagcaacgtgattttctactacaacaacaagtacgagattgtccgaccgtacgacgagatcaagaacgagattttcgagttccacgaaaagcaacgcctggacgacgcgagactggaagacaacatcaacaagaccagggccaacctggttgctaacatggtgggcgtcatatcattcttgcataaggagttctccggattcgtggtgcttgagaacctgaagcagagcgagatcgaggggaaccatcggctcaagtttgagggggatataacgcgcccgcttgagttggcgctgtaccggaagtttcagagcaagtgccttacgccgcctataagcgagctcataaagctgcgggagggcgaaaagaacgagaacgttgagtcggaccttatcctacaatttggtataattaagttcgtcgataaggacaagacgtctaggctctgtcccgcgtgcgggaaagatgcttacgagaacaacaactcaaagtataagacagataagaaggatggggtttttgagtgtgcggggtgcgggttcaacaacaaaaacaatgctggagatttcgcggctcttgacacgaacgataagatagccacctttaacattgcgaagaggggcctctaa

SEQ ID NO: 164 - DNA, 3894 bp, Artificial Sequence
  Synthetic
  misc_feature: SfMmc3 effector gene codon-optimized for Oryza sativa
atggagaacatcaagaacggatatcaactaagcaagacccttcgtttcggtctgacacagaaatgcaaaaagaggcgcaagaattacgagggcgagatctacgaatcacacaaggagttgaacgaccttatcatgttctcggaggagcggataaagcagtctttatccatcgacaagaagtctgagctgcagttcagcataaacaatatcgagaagtgcttactattggtggacaattttttcttttcttggcagcaggtgtatcagcgggatgatcaaattgcgctcgataaagattactataagatactttgtaagaagatcggcttcaacggcttttggacagaacgacgccgtgaacagcgtgtgaagaagccgcagtcccgcgtcattagcttaagtgagttgaaaaaaccagacgagctgggcaaaaagagatttcagtacatcctggactactggcgcgagaacctccttaacgtcgcggaaaaatacaacgtggtttcagaaaagctcaaacagttccaggatgcattgaagatcaatcgcacagacaataagcccaacgaagtcgagctccggaaatcatttctgtctctgctccatctcgtgaacgacacgctgatgccgctgtgttatggccaaatcctattcccgaagatcgaaaagctagacagctctaagtcgcataatcaaaagctcattgagttcgcaaccgatcatcagtctaagtccgacctattgagcgaaataaccgagataaagaaatattttgaggagaacggagggaatgtcccattctgccgggctacgttgaaccctaacacggccatcaagaatccgaagtcctccgacaacaagattgaagaggagattaatatcatcggcctctcgaacatcttgaaggaacataaaagtgttttgttctacgacaaatatctggaggacctctcggtcaaggaaaagataaacttgttgaaaaacaaagattcgaacagcattactagatcactaatgtttaagtgcaagagtgttccagccattgtgcagtatgagatcgccaagacgctgagtaggaaattggataagtccgaggaggatatccgcaatttcctcagagggattggacaagcaaagtcaccagccaaggactacgccgatctccagaacaagaacgatttcaacatcgaagcatatccactgaaagtcgccttcgattttgcctgggaggggctggcgaggtctatctaccaccccgacgcctcatttcccctcgaacaatgccggaggttcctgaatgacaattttggggttaataaggaagataacaatttccagctgtacgctaagctccaagagctcagagactacctgagcgtcctcgagcacaacaaactcaaggacggaacggcccagataaacgcggcccgggaaatcatcgagagtttggactggcagaaaaatttcggggaccggggaaacgggtataagcgcagcattacggtctggctgaacaagtggaagccaaacctgcaggataacgatgataccgatttcaagaccgccaagcagcagataggtttgtttcgcgggtcactaaaaaataagattaagaaatactatgaaataactcaaacttataaggatatcgcgatgcagaccggaaggactttcgccaaaatgcgggacaagatatcgggagctgcggaacttaacaaggtgtcccactatgctatgattatagaagattccaatgcggataagtatgtgttactgcaggagttcacagaaaagaagggggaccgaatctacgcgaagacggactataataacggagatataacagcttacgccgtcaactcggtcacgtctggggccattgccaagatgattaagaagaagcggttagatagtttcaatgataagtacggtgagagcaccttccagcagcaggagctgaccaaagagcaaaaggagcaaaagaatatacgggaatggaagtccttcatagaggaaaagaggtgggacttggagttcaaactgaacaccaaggttaagacctttgagcagcttaagaaggagattgattcgaagtgctacgagctgaataagaagtacattagtcgagatgtgctcgatgatctgatcaacaacaagaattgccttctgcttcccatcgttagtcaggatcttgccaagaaggagaagtcagagatcaaccagttcactaaagactggaatgccgttttcgcccagaacacgccctggagattaactcctgagttccggatcagttaccgcaagccgacacctaactacccagagtcagacaaaggggacaaacgctattcacggtttcagatgatcggccatttcctctgcgattacattcctaaaaatgactattacataagtacacgcgagcagatagcaatatacaaggatgacaagcaacaggaaaccgcggtcaacagattccacgataagctgaaagggcgcactgaagcagaagagcatgtcgattctatcaacgccctgattgccaagtttggcagcgtcaataagaagcaaaaatcaatagtcgtggacaagccgaaggaggaattttatgtttttggcatcgacaggggccaaaaggagcttgcgactctctgcgttatagaccataataagaaaattatcggcaactttgatatctacgtccgctcgtttaacagtatttccaaacagtgggagcacaagttcttagaaaagcggcacatcctggacctatccaaccttcgtgtggaaaccacccttttcatcgacggaaagcccgaaaagaggaaggtgctcgtggatcttagcgaggttaaagtgaaagacaaaaatggtaatttcacgaagcccgataagatgcaaatcaagatgcaacaactggcctatattcgcaaattgcaattccagatgcagactaatccagatgttgttctagcatggtacgagaaaaattcaaccaaggagatgatgttgaaaaactttgtgaagaagagtgatgacgacaacaacggacttgtgtcgttctatggcgccgcggtggaggaactggagaatacgctcccgatagagcgcatctctgagatgcttcaaaagttcgacctgctgaagaagcaggaaaaagagggggaggacattaagctgcaaatcgacaagctagtccaactcgacccagtggacaacttgaagtctggtgtagtcgcgaacatggtaggcgtaatcgccttcttactccaacagttcgaataccaagtctacatatcgctggaggacttgtctgaaccgttttctaatcaaataaccggaggaattaccggtgttcctctttccgtttcgaagggcgatggcaggagggtagatgtcgagaaatacgctggtctgggactgtacaacttcttcgaaatgcaattgctcaagaagctgttccgcattcaacagaataacgagacgatcctccatcttgtcccggcgtttagggcgcagaagaactacgaccatgtcgccgtaggaaaagggaagatcaagaatcagttcggcatcgtgttctttgtggatgcgaatgccacttcgaagacctgtccagtgtgcggaacaactaacaacaacccaaacaaaaaagagtacccgacggcacagaccggtatcagccaggagggcaaggaggtttggatcgagagggacaagtcgggcggaaacgatataatccggtgctttgtatgcggcttcgacacgactaagaagtatacagaaaaccccctaaagtacatcaaaagcggtgacgacaatgctgcgtatcttatcagtgctaagggcatcaaggcgtatgaactggcgattactctcacggacaacaagtga

SEQ ID NO: 165 - DNA, 3195 bp, Artificial Sequence
  Synthetic
  misc_feature: SmpMmc3 effector gene codon-optimized for Oryza sativa
atggagaagtacaagataacgaagacgatcagatttaagctgctgccggacaaaatacaggatatctccaggcaagttgcagtgctccagaactccacgaacgccgagaagaagaataatttgcttcgccttgtgcaacgggggcaagaactgccaaagctccttaatgagtacatcaggtattccgacaaccataagttgaaaagcaacgttacagtccattttagatggctgcgcctgttcaccaaggatctcttttacaactggaaaaaggacaacacagaaaagaaaataaaaattagcgacgtcgtctacctttcccacgtgtttgaggcatttcttaaagaatgggaatcgacgatcgagcgcgtcaatgctgactgcaacaagccggaggagtctaaaacgcgggacgctgagatcgcactcagcatcaggaaactcggcataaagcaccagctccctttcataaagggctttgttgataattctaatgacaagaactccgaggatacaaagtctaagctcacggcactgctgtctgagtttgaggcggtcttgaagatctgcgaacagaattatctgccctcgcaatcatcaggaatagctattgctaaggcatccttcaattactacaccatcaataagaaacaaaaagactttgaggcggagatcgtcgccctcaagaagcaactccatgcgagatacggaaataaaaaatacgaccaactgctgagggagctcaaccttataccacttaaagagctccccttgaaggagttgccgctgatcgagttttattcggagattaagaagagaaagtctacaaagaagtccgaatttttggaagccgtttccaatggtcttgtgtttgatgaccttaagtcaaagttccccctgtttcagacggagtcaaataagtatgacgagtacttgaagcttagcaataagattactcagaaatcaacagctaaatccctcctctcaaaggattcaccggaggcccagaagcttcagactgagattaccaaactcaagaagaatcgcggtgagtattttaagaaggcgtttggcaaatacgtgcagctgtgcgaattgtataaggaaattgcagggaaaagaggcaagctcaaggggcaaataaaggggattgaaaacgagcggatagatagccagaggctgcagtactgggctttggtgctcgaggacaatcttaagcactccctgatcctgattcccaaggaaaagacaaacgagctgtacagaaaggtttggggagcaaaggatgacggcgcatcctcctcctcatcatcgaccctctactacttcgagtccatgacgtacagagcacttagaaagttgtgcttcggcatcaatggtaacactttccttccagaaattcagaaggaacttccgcaatacaaccaaaaggagttcggcgaattctgcttccacaagagcaatgacgataaggagattgatgagccgaagcttattagcttttatcagtccgttctcaagactgatttcgtgaaaaacacacttgcgctcccccaatctgtgttcaacgaggtcgccatccagagcttcgaaacacgccaggatttccaaatagccctcgaaaaatgctgctacgcaaaaaaacagatcatttcagagtccctcaaaaaggaaattctcgaaaactacaacactcagatcttcaagattacctccctcgacctgcagaggtccgaacagaaaaatcttaaagggcacacgcgcatttggaatcgcttctggactaagcaaaacgaggaaattaattacaatctcaggcttaatcctgagatcgcaattgtgtggaggaaggcaaagaaaactaggatagagaaatacggagagcggtcggtcctgtacgagcctgagaagcgcaatcggtatcttcacgagcaatacacactgtgcacaaccgttactgataatgctctcaacaacgagatcacatttgcgtttgaagacacaaagaagaagggcacggaaattgttaaatacaacgaaaaaatcaaccaaacgctcaagaaggaatttaacaaaaaccagttgtggttttacggaattgatgccggcgaaattgagcttgccacacttgcacttatgaacaaggataaggagcctcaactcttcaccgtgtatgagctcaagaagttggactttttcaagcacggctacatttacaataaggaaagggagctcgtgattcgggagaagccttacaaggctatccagaatctcagctacttcctcaatgaggagctgtacgaaaagacctttcgcgatgggaagtttaacgagacttataatgaactcttcaaggaaaagcatgtgtccgcaattgacctgactacagccaaggtcataaacggcaagataattctcaacggtgacatgatcacttttctgaacctccggatccttcatgcgcaacggaaaatctacgaggagctgattgagaatccgcacgcagagttgaaggaaaaagactacaaactgtattttgagatcgaggggaaggataaggacatctatatctcacgcctcgactttgagtacatcaagccgtatcaagagatatccaactatctttttgcatactttgcatctcaacagatcaacgaggcgagggaggaagaacagatcaaccaaaccaaacgcgccctggcagggaacatgattggggtcatctattacctctaccagaagtacagaggtattatatctattgaggaccttaagcaaaccaaggtcgaatccgacaggaacaaattcgaggggaatatcgagcgccctctcgagtgggcgctttatagaaagttccagcaggaaggctacgtgcctcctattagcgagctcatcaagttgagagaacttgagaagttcccgctcaaggatgtcaagcaaccaaagtacgagaacatccagcagttcggcataatcaaatttgtgagcccggaagaaacttctacgacttgtcctaaatgcctccgccgcttcaaggactacgacaaaaacaagcaggagggcttctgcaagtgccaatgcggatttgacacgcgcaacgacctgaaagggttcgaaggtctcaacgacccagataaggtcgctgcgttcaacattgcgaagcgcggtttcgaggatcttcagaagtacaagtaa

SEQ ID NO: 166 - DNA, 3753 bp, Artificial Sequence
  Synthetic
  misc_feature: Smp2Cpf1 effector gene codon-optimized for Oryza sativa
atgaagacgttgttcgaaaatttcactaaccaatactctgtatcaaagactctacggttcgagctgatcccgcaaggaaagacccgcgatttcatcgaacagaagggacttttgcagcaagatgaggacagagcagagaaatataacaaagtcaagaaaacgatcgacgagtaccacaagaacttcatcgagaagagcctcaacggactcaagctcgaagggctcgaacagtacaaaacgctgtatctgaaacaggagaaggatgataaggacaaaaagctgttcgacaaggagaaggagaacctgaggaaacaaatcgcaaacgcgtttaggaataacgagaagtttaaaacactattcgcaaaagagctgatcaagaacgatctgatgaattttgcgtgcgaggaagacaagaaaaacgtcaaagagttcgaggcttttactacctatttcacgggcttccaccagaaccgtgccaacatgtatgtggccgacgaaaaacgcacagcgattgcttctcggttgattcatgagaatttgccaaagttcatagacaatatcaggatcttcgagaagatgaagaacgaagccccggagttgctctcgtcttttaaccaaaccttaaaggatatgaaggacgtcataaaaggaacgacgctggaggagatcttcagcctcgactacttcaataagacgcttacacagagtggtatcgatatctataactcagtcatcggtggtaggactcctgaggagggaaagacgaagatcaaaggattgaacgagtacatcaacaccgactataatcaaaagcagacggacaagaagaagcgccaacctaagttcaagcagctctataagcagattctctcggatcgccagtcccttagctttatcgccggcgcgtttaagaatgacactgaaatcttggaagctatagaaaaattctacgtgaacgagctgctgcatctcagttcagaggggaaatccatcaatgttctcgatgctacgaaaaatgcagtgtcgaacctcgagagcttcgacctcaccaagatatacttccgctctggcgcgagcctcactgacgtgtcaaagaaggtgttcggtgactggtcgataattaatcgcgccttagacaactattacgcgaccacgtatccaattaagcccagagagaagtcagaaaagtacgaggaacgaaaggaaaagtggctgaagcaggattttgacatcaacctcatccagaccgctattaaccagtacgagaacgagactgttaaggaaaagaactccggaaaagtgatcgcggactactttgcgaagttctgcgacgacaaggagacggatctgatccagaaggtcaatgagggatacatagccgtgaaggacttgttgaacacgccgtatccagagaatgagaagctgggttcaaacaaagaccaagtaaagcaaatcaaagcctttatggactctattatggacattatgcatttcgtccgcccgttgagtctaaaggatacagacaaagagaaagatgaaaccttctactccctcttcacccctctttacgacaggttgacgcaaaccatcgcgctatacaacaaagttcgcaactatctaacacaaaagccatactccactgagaagatcaagctcaacttcgaaaacagcaccttgctgggtggatgggacctgaataaggagacagataacacggcgatcatcctccgtaaagacaacctttactacctagggatcatggataaaagtcacaaccggatatttcgtaacgtccccaaggctgataagaaggattcatgctatgaaaagatggtatacaaactgttagcgggcgccaacaagatgctccctaaggtgtttttctcacaatcccggcgccaagagttcagcccctccgccaaattgctggagaactacaaaaacgagacgcacaagaaaggggacaatttcaatctaaaccactgccatgaactcatagactttttcaaagacagcatcaacaagcatgaagattggaagaattttgatttccggtttagcgcaacaagcgcctatgcggacctttcgggcttttatcacgaagtggaacatcaagggtacaagatatcgttccagtcggccgccgactcgttcatagatgatctcgtgaacgaggggaaactctacctcttccaaatctacaacaaagactttagccctttttctaagggaaagccaaacctccacaccctgtattggaaaatgcttttcgccgaggagaatctgaaagacgtcgtatataagttgaatggtgccgctgaaattttttatcgcaagttatccatagccgccaagaatcgtaccgtgcacaaggccaaggagatcttgcaaaacaagaatcccgacaaccccaaggccacatcaaaattcgactacgacataattaaggacaaacgctacaccttggacaagttccaattccatgtgccgattacgatgaactttaaagccgagggtattttcaatatgaaccaacgcgtgaaccaattcctgaaggctaaccccgacatcaacattatcggaatcgatcggggcgagagacatcttctgtactacacgctgattaaccagaaaggcaaaatccttaaacaggatacgctcaacgtcatcgccaatgagaagcaaaaggtcgattatcacaatttgttggacaagaaggaaggagatcgggctaccgcccgtcaggagtggggcgtcatcgaaactattaaggaattgaaagaaggttatttgtcccaagttatacataagctcacggacttgatgattgagaataacgccattatagtgatggaggacctcaacttcggttttaagcgaggccgacaaaaggtcgagaagcaagtgtatcagaagtttgagaagatgctcatcgataagctcaactatcttgtggataagaacaagaaggcgaacgagcttggtggcctgctgaacgcctttcagcttgcgaacaagttcgagtcatttcagaagatggggaagcaaaacggattcatcttttatgtaccggcgtggaacacgtcgaagaccgaccccgcgacaggctttatcgatttcttaaagccgcgttatgaaaacctcaagcaggcgaaggacttcttcgaaaaattcgacagcatacacttcaactcaaaggccgattacttcgagttcgcatttgacttcaagaacttcacggaaaaggctgacgggggccggacaaagtggacagtttgcgctaccaacgaggatcggtacgcatggaacagggccctcaacaacaatcggggtgggcaggagaaatatgacatcacggccgagcttaagagcctgtttgacggtaaagtcgattaccaatcaggaaaagatctaaagcaacaaattgcttcccaggagtcggctgacttcttccgcaccctcatgaagtacctgtccgtgacgttatcgctcaggcacaacaatggcgaaaaaggggaagctgaacaggattacatactctcccccgtggcagattctatgggcaagtttttcgacagcagaaaagcaggggacgatatgccaaagaatgccgatgccaacggcgcgtaccacatcgcgttgaaggggctgtggtgcttggagcagatctctaaaacagatgatctcaagaaggtaaagctcgccatatcaaacaaggagtggctggagttcgcccaaaccctcaaaggatga

SEQ ID NO: 167 - DNA, 3900 bp, Artificial Sequence
  Synthetic
  misc_feature: FnCpf1 effector gene codon-optimized for Oryza sativa
atgtccatctaccaggagttcgtcaataagtacagcctctctaagacgctgcgcttcgagctgatcccacagggcaagaccctcgagaacatcaaggcgcggggcctgatcctcgacgatgagaagcgcgccaaggactacaagaaggcgaagcagatcatcgacaagtaccaccagttcttcatcgaggagatcctctccagcgtgtgcatctccgaggatctcctgcagaattacagcgacgtctacttcaagctcaagaagtctgacgatgacaacctgcagaaggatttcaagtcagccaaggacaccatcaagaagcagatctctgagtacatcaaggactcagagaagttcaagaacctcttcaaccagaatctgatcgacgcgaagaagggccaggagtcagacctgatcctctggctgaagcagtcgaaggacaatggcatcgagctgttcaaggccaactcagatatcacagatatcgacgaggcgctggagatcatcaagtcgttcaagggctggaccacatacttcaagggcttccatgagaaccgcaagaatgtgtactcttcaaacgacatcccaacgtcaatcatctacaggatcgtcgatgacaatctgcctaagttcctcgagaacaaggccaagtacgagtcgctcaaggacaaggccccggaggcgatcaattacgagcagatcaagaaggatctggcggaggagctgacattcgatatcgactacaagacgtctgaggtgaaccagcgcgtcttctcactcgacgaggtgttcgagatcgccaatttcaacaattacctgaaccagtccggcatcacgaagttcaataccatcatcggcggcaagttcgtcaacggcgagaatacaaagaggaagggcatcaacgagtacatcaatctctactcccagcagatcaacgacaagacactgaagaagtacaagatgtcggtgctcttcaagcagatcctgtccgatacggagtcaaagtcgttcgtcatcgacaagctcgaggatgacagcgacgtggtcacgaccatgcagtctttctacgagcagatcgccgcgttcaagacagtggaggagaagtcgatcaaggagacgctctccctcctgttcgatgacctgaaggcccagaagctcgacctgtccaagatctacttcaagaacgataagtccctcaccgacctgagccagcaggtcttcgatgactacagcgtgatcggcaccgccgtcctcgagtacatcacacagcagatcgcgcctaagaacctcgataatccgtcgaagaaggagcaggagctgatcgccaagaagaccgagaaggcgaagtacctctccctggagacaatcaagctcgccctggaggagttcaataagcaccgcgatatcgacaagcagtgcaggttcgaggagatcctcgcgaacttcgccgcgatcccgatgatcttcgatgagatcgcccagaacaaggacaatctggcgcagatctccatcaagtaccagaaccagggcaagaaggacctcctgcaggccagcgcggaggatgacgtgaaggccatcaaggatctcctggaccagacgaacaatctcctgcacaagctcaagatcttccatatctcccagagcgaggataaggccaatatcctcgataaggacgagcatttctacctggtgttcgaggagtgctacttcgagctggcgaacatcgtcccgctgtacaacaagatccgcaattacatcacccagaagccatactcggacgagaagttcaagctcaacttcgagaactccaccctcgccaacggctgggataagaataaggagccggacaacaccgcgatcctcttcatcaaggatgacaagtactacctgggcgtgatgaataagaagaacaataagatcttcgatgacaaggccatcaaggagaacaagggcgagggctacaagaagatcgtgtacaagctcctgccgggcgccaataagatgctcccaaaggtcttcttctcggcgaagtccatcaagttctacaaccctagcgaggacatcctgcgcatcaggaatcacagcacacatacgaagaacggctctccgcagaagggctacgagaagttcgagttcaacatcgaggattgccggaagttcatcgacttctacaagcagtctatctcaaagcacccggagtggaaggatttcggcttcaggttctcagacacccagcggtacaactcgatcgacgagttctaccgcgaggtggagaatcagggctacaagctcacattcgagaacatctcggagtcctacatcgactccgtggtcaatcagggcaagctctacctgttccagatctacaacaaggatttcagcgcctactctaagggcaggccaaacctccatactctgtactggaaggcgctcttcgatgagcggaatctgcaggacgtggtctacaagctcaacggcgaggccgagctgttctacaggaagcagtctatcccaaagaagatcacacaccctgcgaaggaagccatcgcgaacaagaataaggacaatccaaagaaggagtcagtcttcgagtacgatctcatcaaggacaagcggttcacagaggataagttcttcttccattgccctatcacgatcaacttcaagtcgtccggcgccaacaagttcaatgacgagatcaatctcctgctcaaggagaaggcgaacgatgtgcacatcctctccatcgacaggggcgagcggcatctcgcctactacaccctggtcgatggcaagggcaatatcatcaagcaggataccttcaacatcatcggcaatgaccggatgaagacaaactaccacgataagctcgccgcgatcgagaaggatcgcgacagcgcgaggaaggactggaagaagatcaacaatatcaaggagatgaaggaaggctacctctctcaggtggtccatgagatcgccaagctcgtgatcgagtacaatgcgatcgtggtcttcgaggatctcaacttcggcttcaagcggggccgcttcaaggtggagaagcaggtctaccagaagctggagaagatgctcatcgagaagctcaattacctggtgttcaaggataacgagttcgacaagacgggcggcgtcctcagggcataccagctgacagcgcctttcgagacgttcaagaagatgggcaagcagaccggcatcatctactacgtgcctgccggcttcacgtccaagatctgcccggtgaccggcttcgtcaaccagctctacccgaagtacgagagcgtctctaagtcacaggagttcttctctaagttcgataagatctgctacaatctggacaagggctacttcgagttctcattcgattacaagaacttcggcgacaaggccgcgaagggcaagtggaccatcgcgtcattcggctcgcggctcatcaacttccgcaattcggataagaaccacaattgggacacgagggaggtgtacccaaccaaggagctggagaagctgctcaaggactactctatcgagtacggccatggcgagtgcatcaaggccgcgatctgcggcgagtccgataagaagttcttcgccaagctgaccagcgtcctcaatacaatcctgcagatgaggaacagcaagaccggcacagagctggactacctgatctctcctgtggccgatgtcaacggcaatttcttcgacagccggcaggcgccgaagaatatgccacaggatgcggatgccaacggcgcctaccacatcggcctcaagggcctgatgctgctgggacgcatcaagaacaatcaagagggcaagaagctcaacctcgtgatcaagaacgaggagtacttcgagttcgtccagaacaggaacaat

SEQ ID NO: 168 - DNA, 27 bp, Artificial Sequence
  Synthetic
  misc_feature: Encodes N-terminal NLS
atggccccaaagaagaaacggaaggtt

SEQ ID NO: 169 - DNA, 1992 bp, Zea mays
  misc_feature: ZmUbi promoter
ctgcagtgcagcgtgacccggtcgtgcccctctctagagataatgagcattgcatgtctaagttataaaaaattaccacatattttttttgtcacacttgtttgaagtgcagtttatctatctttatacatatatttaaactttactctacgaataatataatctatactactacaataatatcagtgttttagagaatcatataaatgaacagttagacatggtctaaaggacaattgagtattttgacaacaggactctacagttttatctttttagtgtgcatgtgttctcctttttttttgcaaatagcttcacctatataatacttcatccattttattagtacatccatttagggtttagggttaatggtttttatagactaatttttttagtacatctattttattctattttagcctctaaattaagaaaactaaaactctattttagtttttttatttaataatttagatataaaatagaataaaataaagtgactaaaaattaaacaaataccctttaagaaattaaaaaaactaaggaaacatttttcttgtttcgagtagataatgccagcctgttaaacgccgtcgacgagtctaacggacaccaaccagcgaaccagcagcgtcgcgtcgggccaagcgaagcagacggcacggcatctctgtcgctgcctctggacccctctcgagagttccgctccaccgttggacttgctccgctgtcggcatccagaaattgcgtggcggagcggcagacgtgagccggcacggcaggcggcctcctcctcctctcacggcacggcagctacgggggattcctttcccaccgctccttcgctttcccttcctcgcccgccgtaataaatagacaccccctccacaccctctttccccaacctcgtgttgttcggagcgcacacacacacaaccagatctcccccaaatccacccgtcggcacctccgcttcaaggtacgccgctcgtcctccccccccccccctctctaccttctctagatcggcgttccggtccatggttagggcccggtagttctacttctgttcatgtttgtgttagatccgtgtttgtgttagatccgtgctgctagcgttcgtacacggatgcgacctgtacgtcagacacgttctgattgctaacttgccagtgtttctctttggggaatcctgggatggctctagccgttccgcagacgggatcgatttcatgattttttttgtttcgttgcatagggtttggtttgcccttttcctttatttcaatatatgccgtgcacttgtttgtcgggtcatcttttcatgcttttttttgtcttggttgtgatgatgtggtctggttgggcggtcgttctagatcggagtagaattctgtttcaaactacctggtggatttattaattttggatctgtatgtgtgtgccatacatattcatagttacgaattgaagatgatggatggaaatatcgatctaggataggtatacatgttgatgcgggttttactgatgcatatacagagatgctttttgttcgcttggttgtgatgatgtggtgtggttgggcggtcgttcattcgttctagatcggagtagaatactgtttcaaactacctggtgtatttattaattttggaactgtatgtgtgtgtcatacatcttcatagttacgagtttaagatggatggaaatatcgatctaggataggtatacatgttgatgtgggttttactgatgcatatacatgatggcatatgcagcatctattcatatgctctaaccttgagtacctatctattataataaacaagtatgttttataattattttgatcttgatatacttggatgatggcatatgcagcagctatatgtggatttttttagccctgccttcatacgctatttatttgcttggtactgtttcttttgtcgatgctcaccctgttgtttggtgttacttctgcag

SEQ ID NO: 170 - DNA, 835 bp, Cauliflower mosaic virus
  misc_feature: CaMV promoter
agattagccttttcaatttcagaaagaatgctaacccacagatggttagagaggcttacgcagcaggtctcatcaagacgatctacccgagcaataatctccaggaaatcaaataccttcccaagaaggttaaagatgcagtcaaaagattcaggactaactgcatcaagaacacagagaaagatatatttctcaagatcagaagtactattccagtatggacgattcaaggcttgcttcacaaaccaaggcaagtaatagagattggagtctctaaaaaggtagttcccactgaatcaaaggccatggagtcaaagattcaaatagaggacctaacagaactcgccgtaaagactggcgaacagttcatacagagtctcttacgactcaatgacaagaagaaaatcttcgtcaacatggtggagcacgacacacttgtctactccaaaaatatcaaagatacagtctcagaagaccaaagggcaattgagacttttcaacaaagggtaatatccggaaacctcctcggattccattgcccagctatctgtcactttattgtgaagatagtggaaaaggaaggtggctcctacaaatgccatcattgcgataaaggaaaggccatcgttgaagatgcctctgccgacagtggtcccaaagatggacccccacccacgaggagcatcgtggaaaaagaagacgttccaaccacgtcttcaaagcaagtggattgatgtgatatctccactgacgtaagggatgacgcacaatcccactatccttcgcaagacccttcctctatataaggaagttcatttcatttggagagaacacg

SEQ ID NO: 171 - DNA, 253 bp, Agrobacterium tumafaciens
  misc_feature: Nos terminator
cgttcaaacatttggcaataaagtttcttaagattgaatcctgttgccggtcttgcgatgattatcatataatttctgttgaattacgttaagcatgtaataattaacatgtaatgcatgacgttatttatgagatgggtttttatgattagagtcccgcaattatacatttaatacgcgatagaaaacaaaatatagcgcgcaaactaggataaattatcgcgcgcggtgtcatctatgttactagatcggg

SEQ ID NO: 172 - DNA, 516 bp, Oryza sativa
  misc_feature: U6 promoter
tttgtgaaagttgaattacggcatagccgaaggaataacagaatcgtttcacactttcgtaacaaaggtcttcttatcatgtttcagacgatggaggcaaggctgatcaaagtgatcaagcacataaacgcatttttttaccatgtttcactccataagcgtctgagattatcacaagtcacgtctagtagtttgatggtacactagtgacaatcagttcgtgcagacagagctcatacttgactacttgagcgattacaggcgaaagtgtgaaacgcatgtgatgtgggctgggaggaggagaatatatactaatgggccgtatcctgatttgggctgcgtcggaaggtgcagcccacgcgcgccgtaccgcgcgggtggcgctgctacccactttagtccgttggatggggatccgatggtttgcgcggtggcgttgcgggggatgtttagtaccacatcggaaaccgaaagacgatggaaccagcttataaacccgcgcgctgtagtcagctt

SEQ ID NO: 173 - DNA, 28 bp, Oryza sativa
  misc_feature: spacer sequence CAO1sp1 targeting the chlorophyll a oxidase 1 (CAO1) gene
tggagcaacacctgaaggaaggcttgat

SEQ ID NO: 174 - DNA, 12 bp, Artificial Sequence
  Synthetic
  misc_feature: U6 terminator
tttttttgtttt

SEQ ID NO: 175 - DNA, 28 bp, Oryza sativa
  misc_feature: Spacer sequence CAO1sp3 targeting site in the CAO1 gene
gcaagggagttcaagtcaattggaacct

SEQ ID NO: 176 - DNA, 20 bp, Artificial Sequence
  Synthetic
  misc_feature: Index-Sp1-F1 primer
ggtcgcactgttcgatcgta

SEQ ID NO: 177 - DNA, 21 bp, Artificial Sequence
  Synthetic
  misc_feature: Index-Sp1-R2 primer
gaaacatggttcctcccatcg

SEQ ID NO: 178 - DNA, 21 bp, Artificial Sequence
  Synthetic
  misc_feature: Index-Sp3-F1 primer
tgcttgaggttgaagtttcgg

SEQ ID NO: 179 - DNA, 21 bp, Artificial Sequence
  Synthetic
  misc_feature: Index-Sp3-R2 primer
tcatttggctcctgtctcctg

SEQ ID NO: 180 - DNA, 3921 bp, Artificial Sequence
  Synthetic
  misc_feature: AsCpf1 effector gene codon-optimized for human expression
atgacacagttcgagggctttaccaacctgtatcaggtgagcaagacactgcggtttgagctgatcccacagggcaagaccctgaagcacatccaggagcagggcttcatcgaggaggacaaggcccgcaatgatcactacaaggagctgaagcccatcatcgatcggatctacaagacctatgccgaccagtgcctgcagctggtgcagctggattgggagaacctgagcgccgccatcgactcctatagaaaggagaaaaccgaggagacaaggaacgccctgatcgaggagcaggccacatatcgcaatgccatccacgactacttcatcggccggacagacaacctgaccgatgccatcaataagagacacgccgagatctacaagggcctgttcaaggccgagctgtttaatggcaaggtgctgaagcagctgggcaccgtgaccacaaccgagcacgagaacgccctgctgcggagcttcgacaagtttacaacctacttctccggcttttatgagaacaggaagaacgtgttcagcgccgaggatatcagcacagccatcccacaccgcatcgtgcaggacaacttccccaagtttaaggagaattgtcacatcttcacacgcctgatcaccgccgtgcccagcctgcgggagcactttgagaacgtgaagaaggccatcggcatcttcgtgagcacctccatcgaggaggtgttttccttccctttttataaccagctgctgacacagacccagatcgacctgtataaccagctgctgggaggaatctctcgggaggcaggcaccgagaagatcaagggcctgaacgaggtgctgaatctggccatccagaagaatgatgagacagcccacatcatcgcctccctgccacacagattcatccccctgtttaagcagatcctgtccgataggaacaccctgtctttcatcctggaggagtttaagagcgacgaggaagtgatccagtccttctgcaagtacaagacactgctgagaaacgagaacgtgctggagacagccgaggccctgtttaacgagctgaacagcatcgacctgacacacatcttcatcagccacaagaagctggagacaatcagcagcgccctgtgcgaccactgggatacactgaggaatgccctgtatgagcggagaatctccgagctgacaggcaagatcaccaagtctgccaaggagaaggtgcagcgcagcctgaagcacgaggatatcaacctgcaggagatcatctctgccgcaggcaaggagctgagcgaggccttcaagcagaaaaccagcgagatcctgtcccacgcacacgccgccctggatcagccactgcctacaaccctgaagaagcaggaggagaaggagatcctgaagtctcagctggacagcctgctgggcctgtaccacctgctggactggtttgccgtggatgagtccaacgaggtggaccccgagttctctgcccggctgaccggcatcaagctggagatggagccttctctgagcttctacaacaaggccagaaattatgccaccaagaagccctactccgtggagaagttcaagctgaactttcagatgcctacactggcctctggctgggacgtgaataaggagaagaacaatggcgccatcctgtttgtgaagaacggcctgtactatctgggcatcatgccaaagcagaagggcaggtataaggccctgagcttcgagcccacagagaaaaccagcgagggctttgataagatgtactatgactacttccctgatgccgccaagatgatcccaaagtgcagcacccagctgaaggccgtgacagcccactttcagacccacacaacccccatcctgctgtccaacaatttcatcgagcctctggagatcacaaaggagatctacgacctgaacaatcctgagaaggagccaaagaagtttcagacagcctacgccaagaaaaccggcgaccagaagggctacagagaggccctgtgcaagtggatcgacttcacaagggattttctgtccaagtataccaagacaacctctatcgatctgtctagcctgcggccatcctctcagtataaggacctgggcgagtactatgccgagctgaatcccctgctgtaccacatcagcttccagagaatcgccgagaaggagatcatggatgccgtggagacaggcaagctgtacctgttccagatctataacaaggactttgccaagggccaccacggcaagcctaatctgcacacactgtattggaccggcctgttttctccagagaacctggccaagacaagcatcaagctgaatggccaggccgagctgttctaccgccctaagtccaggatgaagaggatggcacaccggctgggagagaagatgctgaacaagaagctgaaggatcagaaaaccccaatccccgacaccctgtaccaggagctgtacgactatgtgaatcacagactgtcccacgacctgtctgatgaggccagggccctgctgcccaacgtgatcaccaaggaggtgtctcacgagatcatcaaggataggcgctttaccagcgacaagttctttttccacgtgcctatcacactgaactatcaggccgccaattccccatctaagttcaaccagagggtgaatgcctacctgaaggagcaccccgagacacctatcatcggcatcgatcggggcgagagaaacctgatctatatcacagtgatcgactccaccggcaagatcctggagcagcggagcctgaacaccatccagcagtttgattaccagaagaagctggacaacagggagaaggagagggtggcagcaaggcaggcctggtctgtggtgggcacaatcaaggatctgaagcagggctatctgagccaggtcatccacgagatcgtggacctgatgatccactaccaggccgtggtggtgctggagaacctgaatttcggctttaagagcaagaggaccggcatcgccgagaaggccgtgtaccagcagttcgagaagatgctgatcgataagctgaattgcctggtgctgaaggactatccagcagagaaagtgggaggcgtgctgaacccataccagctgacagaccagttcacctcctttgccaagatgggcacccagtctggcttcctgttttacgtgcctgccccatatacatctaagatcgatcccctgaccggcttcgtggaccccttcgtgtggaaaaccatcaagaatcacgagagccgcaagcacttcctggagggcttcgactttctgcactacgacgtgaaaaccggcgacttcatcctgcactttaagatgaacagaaatctgtccttccagaggggcctgcccggctttatgcctgcatgggatatcgtgttcgagaagaacgagacacagtttgacgccaagggcacccctttcatcgccggcaagagaatcgtgccagtgatcgagaatcacagattcaccggcagataccgggacctgtatcctgccaacgagctgatcgccctgctggaggagaagggcatcgtgttcagggatggctccaacatcctgccaaagctgctggagaatgacgattctcacgccatcgacaccatggtggccctgatccgcagcgtgctgcagatgcggaactccaatgccgccacaggcgaggactatatcaacagccccgtgcgcgatctgaatggcgtgtgcttcgactcccggtttcagaacccagagtggcccatggacgccgatgccaatggcgcctaccacatcgccctgaagggccagctgctgctgaatcacctgaaggagagcaaggatctgaagctgcagaacggcatctccaatcaggactggctggcctacatccaggagctgcgcaac

SEQ ID NO: 181 - DNA, 3171 bp, Artificial Sequence
  Synthetic
  misc_feature: CrpMmc3 effector gene codon-optimized for human expression
atggaaatccaggagcttaagaatctctacgaagtgaagaaaacagtccggttcgaattgaaaccgagtaagaaaaagattttcgaggggggcgacgtcatcaagcttcagaaagactttgagaaagtacaaaaattctttctggacatttttgtctacaaaaacgagcataccaagctagagtttaaaaagaaaagagagataaagtatacctggcttagaaccaataccaagaatgagttctataactggagggggaagtccgacactgggaagaattacgccctcaataagatcggatttcttgctgaagaaatcctccggtggctgaatgaatggcaagaactgactaaaagtttgaaagatctgacacagcgtgaggagcataaacaggagagaaagtcagacattgcttttgtcctgagaaatttcctgaaacggcagaatctgcccttcataaaagacttcttcaacgctgtgatcgacatccaggggaagcaaggcaaagagagcgacgataagataagaaagttccgggaagagattaaggaaattgagaagaatctcaatgcatgtagccgcgaatatctgcccacgcagtccaatggcgtgctgttgtataaggccagcttttcctactacactctgaataagaccccaaaagaatacgaggatctcaagaaggaaaaagaatccgaactgtcctccgtgctgttaaaggagatatatcggagaaaaaggttcaacaggactacaaaccagaaagataccctgtttgaatgcacctccgattggcttgtgaagatcaaactgggcaaggacatatatgagtggactctcgatgaggcctatcaaaagatgaaaatttggaaggcaaatcagaagtccaatttcatcgaggccgtggccggggataaactgactcaccagaacttccgcaaacagtttccactctttgacgctagcgacgaggactttgaaacgttttatcgcctgacaaaagccctggataagaatccggagaatgccaaaaagattgctcaaaagagaggaaaatttttcaatgccccaaacgaaaccgtccagaccaaaaactatcatgagctatgcgagctttacaagcgcattgcagtcaagcgaggtaaaattatagctgagatcaagggcatcgaaaatgaggaggttcaatcccagctgctgacacactgggctgttatcgccgaagaacgcgacaagaagtttatcgtcctcattcctcgaaagaacggtggcaagctggagaatcacaaaaacgcccacgcctttctgcaggagaaggaccggaaggaaccaaatgacattaaggtttatcactttaagtctctgactttacggtcactggagaaactgtgtttcaaggaggccaagaatactttcgccccagagatcaaaaaggagactaatcctaagatctggtttcctacttataagcaggaatggaattctacgccggagcgcctgataaagttctacaaacaagtgctgcagtctaactacgcacagacatacctcgacctggttgactttggaaacttaaacacatttctggaaacccactttacaactctggaggaattcgaaagtgatctggagaagacttgctacaccaaagtgcctgtgtatttcgctaagaaagagctggagacattcgccgatgaatttgaggctgaagtgttcgagataaccactaggtctatctccacagagtccaaacgaaaagagaacgcgcacgcagagatttggcgggacttctggtcccgcgagaacgaggaagaaaaccatattaccagactgaaccccgaagtgtccgtcctctatcgcgacgaaattaaggaaaagagtaacacctcacggaagaataggaagtctaatgccaataacagattctcagacccacgctttacactggctactactataacccttaacgcagacaagaaaaagagtaacctggcattcaaaaccgtggaggacattaatatccatatagataactttaacaagaaattcagcaaaaatttttccggcgagtgggtatacggaatcgatagaggactaaaagagcttgctacactgaacgtcgtcaagttctccgatgtaaagaatgtcttcggagtttctcagcccaaggagttcgcaaaaatacctatatataagctgcgagatgagaaagctatactaaaggatgagaatgggctgtcattgaaaaacgcaaagggcgaagcccggaaggtcatagacaacatctccgacgttctcgaggaaggaaaggagcccgacagcacattgtttgagaagagggaggtctcctccatagatctcacccgggccaagttaatcaaggggcatatcatctctaatggtgaccagaagacatacttgaaactgaaggagaccagtgcaaaacggaggatttttgagcttttctcaactgcaaagatcgataaaagctcccagttccatgtacgcaaaacaatcgaactgtccggcaccaagatctattggctgtgcgaatggcaacgtcaggacagctggagaacagagaaggtctcgcttagaaatactttgaaaggctatctccagaatctcgacttgaaaaatcgctttgagaatattgagaccatagagaagatcaatcatctccgcgatgctattaccgccaatatggttggtatactctcacatctgcagaacaagctggagatgcagggagtaatcgccttggagaatctggatactgttcgggaacagtctaacaaaaagatgattgatgagcattttgagcagagcaatgaacatgtgagtagacgcctcgaatgggcgttgtattgtaagttcgccaacacaggagaggtgccacctcagataaaagaatctatattcctgcgagacgagtttaaagtgtgtcagataggaattctgaacttcattgacgtcaaggggactagctcaaattgcccaaactgcgaccaggaatctagaaaaactggctctcacttcatatgcaattttcaaaacaactgcatattttccagtaaggagaatcgcaacctgctggagcagaacctgcacaattcagacgacgtggcagcttttaacatcgctaagcggggactcgagattgttaaagtc

SEQ ID NO: 182 - DNA, 3099 bp, Artificial Sequence
  Synthetic
  misc_feature: NapMmc3 effector gene codon-optimized for human expression
atggagaactctaacctgtatcaagtcgtaaaaacaatccggttcaagctggaaccagtggggaaaatggataccccaaagtttggagacaaaaacgctgagtccaaggccaacctgaccccattcattgagctggtgaagaaaacaatgacaaacgtgaaggctctcgtgttcagcaagcaagatggagaagacggggagaaatggaggaagattcttgaggttaactaccgattcttacggagttacctgaaaaattcgttctatgagaatcgcggagattcccaggagaagtcgaagaaacacaagatttcggacctggaatatcttcagaaggcgttggaaaatctgttcgctgaattcgatgaaattctggatgggctagaagacttcgagaagcgtaacacaaagaatcagtacgaaaaacagaggcacgcccaagccgggcttctgctgaatcgtttgtgtaaaaggtcaaacttcggattccttaaggccttcgtcggcgctctcgcgcagactaataagcccttcttcgatgacaagaccgataaactaaagaaacagattgacaagttcgaaaccgagctggagaaacagaaagaattcttcctgccatatcagtcaaatggcgtgctatttgcagggggcagttttaacaggtatgctattaacaaaactcccaaaatgctggataaggagttgcgcgaagagcagactaatctgaagaagagtttgtgcgaacacaagatcaagatcgatacactgaacacactcgggctgaagaacgactgtccttgcacttctctggacaactcatatactttcatcaaggattacaaggcgaaacagaagtccaaattcattgaattagtccagaaaggcgaattcgacgaggccaagaaggtcaatctgttcgaatgctctgaaacggacttcgaaacttttaagacgcgcactaaacagatccagaacgaaaaggacaaggacgaaagaaccaagctaaaacagaaacgcggagaatttttcaaatctcagaagagaggcaaattcttcaagagtcagacacagaattatgagaacttatgtgatctttataagaagatagcccagaaacggggacagattgtggcgaagatttgcgcaattaagaaggagaaagagatgtgcgagcaggtcaagtactggtgtgttgccctcgaaaagggaggggagttctacctttatatgttcttaagagacgagaacgataacatcaagaacgcctatgactttgtgtcaaaactgcagacacagaaaagtggggaaaccaagctgcactacttcgacagcttgacactcaaggccgtcagaaaattgtgttttaaagagacggacggttcttttaagaaggctctgaaaaacgtgaagtttccagagtgtgagcaaaatctggatgagaaggtgaagatctccttttaccagaacgtgcttaaaaatgccaagacccttaacctgtccaagtttgagaatcttcagagtgtcactgagggcaaatttgagtcactgagtgagttcgaggtcgccctgaacatggtttgctatacaaaaaccgtttgtgtctcagagtcggtggagaaagaattgaagaaattcaaacccctagtgtttcatattacctcccaggatctcgctgcaaaacgcgagaagaaggcacacacccagatttggcacgaattttggcgggaaagcaatgagaagtccaagtttccattgaggttgaatcccgagcttaaggtcatgtggcgtgaagctcggcccagtagggtggaaaagtatgctgagcagtctgacaaattcgatcctaacaaaaagaacagatatctccatccacagttcactcttgccctcaactttactcagaacgcgcacaacgaggcaattaacctcgcttttaaagacgtccagaacaaaggtgaagcggtcaagaagtttaacgagaactttaagagcagcgagtacgcattcggcattgatgtcggcacaaaagaccttgctctgctctgtctcatcgacaaaaacaagaaacccgtgaattttgacgtgtacgagatttgtaacgaaaatgagatctgtaatgaaaagcttgggttcgaaaagtttgggttctacaaagacggtaccaggagagatgaaccgtacaaattgatcaaaaacccgtcgtactttctgaacgagtcattatacaagaaaacattcaacgccaccaaggaggaatttgaacgatctttctccgaactctttaagcgcaaaagtgtgtgtgccctggacctaactacagctaaggtcatctgcggcaagatcattctgaatggagacttcagtacccatcttaatctgaagatcctaaacgcaaaacgcaagatttctgctaaactgaagaaggaccccactcttaagatcgagtatgacaacgatgacaacatcctatttggatcaaatgttatattctactacaacaataagtacgaaatcgtccgcccttatgacgagatcaaaaatgaaatttttgaattccatgagaagcagcgccttgatgacgccaggttagaggataacatcaacaaaacccgcgccaatcttgtggctaacatggtgggcgtgataagcttcctgcataaggaattctccgggtttgtggttctcgaaaacctgaaacagtctgagatagaagggaaccaccgcctcaagttcgagggagatatcacacggccccttgaactcgctctgtaccggaaatttcagagcaagtgtctgacccccccaatcagcgagcttataaagctgcgcgaaggtgagaagaacgagaacgttgaatcggacctcattttgcagttcggaatcatcaaattcgtcgataaagataagacatctcgcctttgtcctgcttgtggcaaggacgcttacgagaataataatagtaagtataaaaccgataagaaggatggggttttcgagtgcgcgggctgcgggttcaataataagaacaatgccggagacttcgcagccctggacaccaatgataagatagccactttcaacattgctaagcgcggtcta

SEQ ID NO: 183 - DNA, 3201 bp, Artificial Sequence
  Synthetic
  misc_feature: ObpMmc3 effector gene codon-optimized for human expression
atgaagaatggtatcaacctgtttaaaactaagactactaagacaaaaggtgttgacatggagaaataccagattacaaaaactatcagattcaagctgctgcctgacaatgcacacgaaattgtggaaaaggtgaagtcccttaagacttccaacgtcgatgagctgatggatgaggttaagaacgtgcacctgaaaggcctcgaactcttgttcgcactaaagaagtatttctattttgatgggaaccagtgtaagtcctttaagagtaccctagaaatcaaggcccggtggctgagactttacaccccagaccagtattatctgaaaaagagcagtaagaacagttatcagttgaagagcctatcttactttaaggacgtgtttaacgattggctttttaactgggaggaatcagtgtccgaattggcaatcatctacgaaaaatacaagatatgccagcaccagcgagacagccgtgctgacatcgccctgctgatcaaaaagctgtcgatgaaggaatattttcctttcatcagcgatctgattgattgcgttaacgacaaaaactctaacaaaaccttccttatgaagctttctgaagaattgagtgtcttactcgaaaaatgcaactccagagctctgccgtatcagagtaacggtatcgtcgtgggcaaggcatcattgaactactacactgtctccaaatcagagaaaatgctgcagaacgaatatgaggatgtgtgccagagcctggataagaattatgacattactgagatgaaagtgattttgtataaggagaagcttgacaacctgaatttcaaagacgtcacgattgccaacgcctataatcttttgaaggaaaataaggccctccagaaacgactcttcagcgaatatgtgtctcagggcaaagtcttgtctcttattaagaccgaactgcccctgttttccaacattaatgataatgacttcgaaaagtataaggaatggagtaatgagataaagaagctcgcggataagaaaaatacattttgcaaaaagacccagcaggacaagatcaaagatattcaaaataagatttccgagctgaagaagaagcgcggagcactgtttcagtacaagtttacaagttttcagaaacattgcgacaactacaagaaagttgccgttcaatacggaaaactcaaagccaggaagaaagcgatcgagaaggacgagatagaagctaatttgctgagatattggtccgtaatccttgagcaggaggacaaacactccctcgtcttaattcctaagaataacgccaaagacgctaagcagtacatagaaacaatcaacactaagggaggaaagtatataatccatcatctagattcattgactctccgagctttgaacaaactttgcttcaatgctgtggatatcgagaagggccagatggtcagggagaacaccttttatcagggcatcaaggaggaattcgaaaggaacaaaatcaactgcgataaccagggagtgctcaagatccagggcctatatagttttaaaacagaaggaggccagatcaacgagaaggaagctgttgagtttttcaaggaggtgctcaagtcaaattacgcccgggaagtcctcaatcttccttatgatctggaaagcaatatttttcagaaagagtacacaaacctggaccagttccggcaagacctcgaaaagtgctgttacgctttgcacagcaagataggaaaagacgacttagacgaattcacacgtcgtttcgaggcgcaggtttttgacattacatccatagacctgaagagcaaaaaggaaaagaccaagacaacgggggaaatgaagaaacacactcaactttggctagagttctggaagggcgcaattgagcagaatttcgccacacgcgtgaaccctgaattatcaatcttttggcgtgcgcctaagtcctcacgcgaaaagaagtatgggaaaggcagtgacctgtacgaccccaacaagaacaacaggtatttgtatgaacagtacacgctggcattgactataaccgagaacgctgggagccattttaaggacattgccttcaaagacacctcaaagataaaagaagcgatcaaggagttcaatatgagtctgagccagtccaagtactgttttgggattgataggggtaacgctgagctggtgagcctgtgcctcattaagaatgaaaaggatttccctttcgagaagttcccagtatacagactgagagatctgacatatcagggcgattttaaagataagcacgatcagatgcgatatggtgtcgccatcaaaaatatcagctacttcatagatcaggaggacttgtttgagaagaataatctctccgcaatcgacatgaccaccgccaagctcatcaagaacaagattgtcctcaacggcgacgtgttaacatacttaaagctcaaggaggaaaccgctaagcacaaattaacgcaattctttcaggggagcagcatcaataagaatagcagagtgtattttgatgaagatgagaacgtcttcaaaataaccaccaacaggaaccataatccagaggaaatcatctacttttacagaggcgagtatggcgcaatcaaaaacaaaaatgatctggaggatattctgaatgaatatctgtgtaaaatggagaccggcgaaagtgagatagtcttactcaaccgggtaaaccaccttagggacgccattagtgccaacatagttgggattctgtcttatcttattgatctgtttcccgagactatcgtggctctagagaacctggcaaaaggcacaattgatagacatgtgtcccagagttacgaaaatatcacacgccgattcgaatgggctctctaccggaagctcctgaacaagcagcttgcaccacccgagttaaaagaaaacatcctgctcagggaaggggacgataaaatcgaccagtttgggattatccacttcgtcgaggaaaagaatactagtaaggactgccccaactgtcgcaaaaccacacagcagaccaacgacaacaagtttaaggagaagaagttcgtgtgtaagtcctgcgggttcgataccagcaaagacaggaaaggaatggacagcctgaattctcccgacacggtggcagcgtacaatgtggctcggaagaagtttgagtct

SEQ ID NO: 184 - DNA, 3696 bp, Artificial Sequence
  Synthetic
  misc_feature: SfpMmc3 effector gene codon-optimized for human expression
atgctgcatgcctttaccaatcaataccaactgtctaaaacactacggttcggtgcgaccttaaaggaagacgagaagaagtgcaaatcacatgaggagctcaaggggttcgtggacatcagctacgaaaatatgaaaagctctgcaaccatcgcagagagcctcaacgaaaatgagctcgtaaagaaatgtgagcggtgttattcagaaatcgtgaagtttcacaacgcatgggagaaaatctattaccgaacagaccagatagccgtctataaggacttttatagacagttgagcaggaaagccaggttcgacgccggcaagcagaattctcagctgataacactggcctccctatgtgggatgtatcaaggcgccaagctgtcgcgctatatcacaaattactggaaggacaatatcacacgtcagaagagcttcctgaaggattttagccagcaactccatcagtacactcgtgcccttgagaaatccgacaaagcccatactaagccaaaccttataaacttcaacaagacctttatggtccttgctaatcttgttaacgaaattgtcattccactcagcaacggagctataagcttcccaaacattagtaaacttgaggatggagaggaaagtcacttgatcgaatttgccctgaacgactactcccagctcagtgagctgatcggcgagctcaaggatgctattgctaccaacggtgggtatactcctttcgccaaggtgactctgaatcattatacagcggagcaaaaaccccatgtgtttaaaaatgatatcgatgctaaaatcagagagctgaaactcatcggtcttgtggaaaccctgaaagggaaatccagtgagcagattgaggagtacttctcaaacctcgacaaattctcaacatacaatgatcggaatcagtccgtaattgtacggactcagtgtttcaaatacaagccgatccctttcctggttaaacaccagcttgccaagtacatcagtgagcccaacggttgggacgaggacgctgtggccaaagtactggatgcagtaggcgcaatccgttcacctgcccatgattacgccaacaaccaggagggctttgacctgaatcactatcctattaaggtggcttttgattatgcatgggagcaattagctaatagcctctacacaaccgtcacctttccccaagaaatgtgcgagaaatatctgaacagcatctatgggtgcgaggtgtctaaggaaccggtctttaagttttacgccgacctgctgtacattcgcaagaacctcgccgtcttggaacataagaacaacctgccttcaaaccaggaggagttcatctgtaaaattaacaatactttcgaaaatatcgtgcttccgtacaagatcagccagttcgaaacgtacaagaaggacattctagcttggatcaatgatggccacgaccataagaagtataccgatgccaaacaacagctgggcttcatcaggggaggcttgaaaggccgcatcaaggctgaagaggtgtcacagaaagataagtacggtaaaatcaagtcttactacgagaacccctacaccaaactcaccaatgagttcaaacagataagcagtacatacggaaagacttttgctgagcttcgcgataagtttaaggagaaaaatgagataactaagattacacactttggcatcataattgaagataaaaacagggacagatatttgttggcgtcagagttaaagcacgagcagatcaatcatgtgtccaccattctgaacaaactagataaaagtagtgagttcattacataccaggtgaagagcttaactagcaagaccttgataaagctcattaagaaccacaccactaagaagggagccatttccccttatgccgatttccacacctcaaagacaggattcaacaaaaatgagatcgagaaaaattgggataactacaaaagagagcaagtcctagtggaatacgtgaaggattgcctaacagactcaaccatggcgaaaaatcaaaattgggcagaatttgggtggaatttcgagaaatgcaattcatatgaggacatcgaacacgagatagaccagaagagttacctgctgcaaagcgatacaatctccaaacagtccattgcttcactagtagaggggggttgcttactgctcccaatcattaaccaggatatcactagcaaagaacgcaaggataagaatcagttctcaaaggactggaatcacatctttgagggcagtaaagaattccggctccacccagagttcgctgtctcttacagaacccctatcgaaggttacccagtccagaagcgctacggaaggctgcagttcgtgtgtgctttcaacgcccacattgtgcctcagaatggagagttcattaacctgaagaaacagattgagaatttcaacgatgaggatgtgcaaaaacggaatgtgacagaattcaacaagaaagtgaaccatgctctttccgacaaggaatatgtagtgatcggcatagatcgaggactaaaacaactggcaactctatgtgtactggataagagggggaaaatcctgggagatttcgagatatataagaaggaattcgtgcgagcagagaaacggtcagagtcgcactgggaacacacccaggcggaaaccagacatatacttgacctgtcgaacctgcgcgtagaaaccaccatcgagggaaagaaggtgctggttgatcagagtctcacccttgttaagaaaaaccgggatacgccggacgaagaagccactgaggaaaacaaacaaaagattaagcttaagcagttatcttatatcagaaaattgcaacacaagatgcagaccaacgagcaggacgttctggatctgattaacaacgaaccgagcgacgaggagtttaagaagcggatcgaggggttaattagctccttcggcgaaggacagaaatatgcagacttgccgatcaacaccatgcgtgaaatgatcagtgacctgcaaggcgtaattgcacggggcaacaatcagacagagaagaataagatcatcgaactcgatgctgcagataatctgaaacagggcatagtggccaacatgatcgggattgtcaattacatttttgccaagtatagctataaagcgtatattagtttggaagacctatctcgtgcctacggcggcgccaaaagtgggtacgacggtcggtaccttccttccacatctcaggatgaggacgtggatttcaaagaacagcagaaccagatgcttgccggactaggtacctatcaattcttcgagatgcagctgctgaaaaagctgcagaagattcagtccgataataccgtgcttcgatttgtgcccgccttccgctcggctgataattaccgaaatatcctccgtttggaagagacaaagtacaagagcaaacctttcggcgtagtgcacttcattgatcctaagttcactagcaagaaatgccccgtttgctctaaaacaaacgtgtacagggataaggacgatatcctcgtttgtaaggaatgcggctttaggtccgatagccagctgaaagaacgcgagaataatatccattatattcataatggcgacgataacggcgcctaccacatagctttgaagtctgttgagaatctcatccagatgaag

SEQ ID NO: 185 - DNA, 3192 bp, Artificial Sequence
  Synthetic
  misc_feature: SmpMmc3 effector gene codon-optimized for human expression
atggagaaatacaaaatcactaagaccatacgtttcaagctgctgccggacaagatacaggacattagtcggcaggtggcggtcttacagaattctacaaacgcggagaagaagaataacctccttcgtttggtgcagagaggacaagagctccccaagctcttgaatgagtacatcagatacagcgacaatcacaaactgaagtccaacgtcacggtccactttcggtggcttaggctcttcaccaaagatctgttctacaactggaaaaaggacaacactgagaagaaaatcaaaatatcagacgtcgtttatcttagccacgtgttcgaagcctttctcaaagagtgggagtcgaccatcgaaagggtgaacgccgactgcaacaaacctgaggaatctaaaaccagggatgcggaaatagccctgtcgatcaggaagctcggtatcaagcaccagctgcccttcataaagggttttgtcgacaattcaaatgacaaaaattctgaagataccaagagcaaactcaccgctctgctgtctgaatttgaagctgtgctgaaaatctgcgagcaaaactacctgccatcacagtcttccggtatcgcaatcgctaaggcttcgtttaactactacactatcaataagaaacaaaaggactttgaggccgaaattgttgcccttaaaaagcagctccacgcccggtacgggaacaaaaagtacgaccaattgctccgcgaactcaacctgattccgctcaaggaactgcctctgaaagagcttcccttgatcgaattctactccgaaatcaagaagaggaagagtactaagaagagcgagtttctggaggccgtgtccaacgggctggtttttgacgacctgaagtcaaagttcccgctcttccaaaccgagagcaataagtatgatgaatatctgaaacttagcaataagatcacacagaaaagtacagctaagtctctgctgagcaaagattcccctgaggcccagaaactgcagaccgagatcacgaagctcaagaagaatcgtggcgaatacttcaagaaagcatttgggaaatacgtccagctgtgtgaactctataaggagattgccggcaaacgcggcaaacttaaggggcagataaagggcattgaaaacgaacggatagatagtcaaagactgcagtactgggccctggttctggaggataatctgaaacactcactgattctcattcccaaagagaaaactaacgagctttaccggaaagtgtggggcgcaaaggatgacggagcatcctcatcatcttccagcaccctctattatttcgaaagcatgacataccgggctttgaggaagttgtgctttgggatcaatggcaatactttccttcctgagattcagaaagagctaccacagtataatcagaaggagtttggcgagttctgctttcacaaatctaatgatgacaaggagatcgacgaaccgaagctcatcagcttttatcagagcgtactgaagaccgattttgttaaaaatactctcgcactcccgcagagcgtgttcaatgaggttgcaatccaaagcttcgagacgcggcaagacttccaaatcgcgctggagaaatgctgctacgcaaagaagcagattatcagcgagtcgctcaagaaagagatcctggaaaattataacactcagatctttaaaattaccagtcttgatttgcagcggtccgagcagaaaaatcttaagggccacaccaggatttggaatcggttctggactaagcaaaacgaagagattaactataacctgcgtcttaatcccgagatagctatcgtgtggcgaaaagccaagaaaaccagaatcgaaaaatatggcgagcggtctgtcctatacgagccagaaaagcgcaatcggtacttgcacgaacagtacacattgtgcaccacagttacagacaacgccctgaacaatgaaatcactttcgcattcgaggataccaagaaaaaggggacggagatagtgaaatataacgaaaagataaaccagactctgaagaaagagttcaataagaaccagctgtggttctacggcatcgacgcgggggagattgagctggccaccctagcactcatgaacaaggataaggagccccaacttttcaccgtgtacgaacttaaaaagctggatttcttcaaacacgggtacatctacaacaaggaacgtgaacttgtgatcagggaaaaaccttacaaagcaatccagaacctgtcttacttcctgaatgaagagctttatgagaaaacctttcgggacggaaagttcaatgagacctacaatgaactctttaaggagaaacatgtaagcgcaatcgacctaaccactgcaaaagtgataaacggaaagatcatcctgaatggtgacatgattacatttcttaatctccgaattttgcatgctcaaagaaagatctatgaagaattaattgaaaaccctcacgccgagctaaaagaaaaagactataaactatattttgagatcgaagggaaggacaaagatatctacatctctaggttagattttgagtacataaagccgtaccaggagatttcaaactacctatttgcatatttcgcctcccagcagattaatgaggcacgcgaagaggagcaaattaatcagactaaaagagcgctcgcgggcaatatgatcggcgtcatctattacctctaccagaagtaccgcgggattatcagcatcgaagacctgaagcaaactaaagtggaatcagacagaaacaagttcgaggggaacattgagcgaccgctcgaatgggccctatacaggaaatttcagcaggaggggtatgtgccgcccatttctgagctcatcaagttgagggaactcgaaaagttccctttgaaagacgtcaagcagccgaagtacgagaacattcagcagttcggcattattaagttcgtatctcctgaagagacttccactacatgtcctaagtgcctcagacggtttaaggactacgacaaaaacaagcaagagggattctgtaagtgccaatgcggctttgacactcgaaacgacctgaagggatttgaggggttaaacgaccctgataaggtcgctgccttcaatatcgctaaacgcggctttgaagatttgcagaagtataaa

SEQ ID NO: 186 - DNA, 3855 bp, Artificial Sequence
  Synthetic
  misc_feature: SvMmc3 effector gene codon-optimized for human expression
atgaagaagaacgagaacaaataccagctttcaaaaactctgagatttgggctgactctgaaggagaagattagcaacaacgagaaaacaccctaccagtctcactctcaatttcgcgacctcatcattctgtccgaaaaccgcatccgcgagggtatatcaacccctcagaaccgcgatctgccttcgttcattcaccggattcagaattgcacagactttatcaatgacttcatccacgattggtggatgatactcatgcacactggccagattgagttggataaagactattataagtctcttactaagaaggtgggattcgttggtttttggtacaaggagaataagaaaaagggcggcaagacgaaacaaccccaggcacgcaatattccaatgggggagctccggcatctatgtccacagaacactaaggagtgcgctacgtatattaccgactactggaaggatctgttaattacagcagccaacaaactacacgagtcttccgaacagcaaaagaagtttataaaagccatggagcaaaaccggactgacaataagccgaatgagatcgatctgaagaaaagtttcctgtcattggtgagcgtgacaatggagctgttgaaccctattctgaatgggcagattctctttaacaagatggatcggctggacatgagtaaaaagagtgacaacgacttcattgatttcgtgaacgatcatgagacagtaagagagctgaacaacgatattgaagaaattattgctgattttaaagagaacggcaataacgttaactattgcaaagccacattgaatcccgatactgccttaaaacagcacaataacaatatccctaatgacattgcgacagacctggaggagctgatgatggacagcatcgtcggcaattacgatgacgtaaactcttttatggacaattgtgtctccaacctctcagcaaaggagaaaattcgtatcatcaaagattccaatatctctctgatatacagggctatattgtttaagtataagatgattccggctaacgtgagacgtgatatcgcacagggaatggccaagaagatcaacaaagatgaagagaacatctattcgtttctctgtgagttcggcaccctccgtacgcctcagaaagattacgcggatctcaaagacaagaattccttcaacctcaatgactatcctctcaaagtggctttcgacttcgcttgggagggcctggcgaaagcacaacaccacgaccagtctgattttccctttgacctctgccgaaacttcctccaggaaaacttcgacgttaacctggaagaaaatcaggactttctgctgtatgcggatctgattgagctcaacgcccttctgagtaccctcgacaaggggaatccagctgatcccgattcaattattaagaaagcacttgacatggtggaacaaattaactgggattccttcgacgaaaagaggggcaatgagtataagaaacgcggcaacgagtacaaaagagtgataatcaacagactcaatttcagcaaggacgacgagaaatacgaacgtatcaagaaagaaatctcaatgagccgaggtcgtctaaagaacaagatcaagaaatacgatgacctcactagccagtacaaacgaattgcaatggacctgggaaagaagtttgcctctttacgcgacaaaattatcgacgctaacgaggacaataaggtgacgcattacgccatgatcttggaggactccaattgcgacaaatacctcttgctgcagaaagtctcaaacaatatcgaggataacatctaccattgtatgtcttacgacagcagcgaccctaaagcatattacgtggattctattacctcatctgccatcgccaagatgattaggaaagaaaccaatccctctaagatccgcgagtatgcagagctggaggaaaaagaaagggagcggcgcaatgttgacgactggtgtcgcttcattagcaaaaaggaatatgatcgaagataccagctgaacatcaacaatggcctgagcttcgaggccctgaagaaggagattgactctaagtcctatatcctcgtcaagaaaaatatcagcgtcgacagtatcagggagctcgtagagaatgagggatgtttgctatttcccatcgtgaacaaggacctgaccaaggagcgcaagacaacagaggacaatcagttcacaaaagactggaacatgatcttcagcggtagcgagacaaactggcgacttacaccagagttccgagtgacttatcgcaatcctgtcccaggctaccctaatgacaagtttggttctaagcggtactcccggtttcagatgaacgcccattttgtgtgtgacttcatcccttcttctaacagctacacatccaatcgagagcagattgctatcttcaaggacgagggcgagcagaagaaaagagtggaggagttcaacagaactctgtcaaatatcaatcagaaattctacgtgatcgggatcgatagaggccagaaagaactggccacgctgtgcgtagtcgaccaagacaaaaagatacatggagactttaagatctacacccgccagttcaatagtgaaaggaagcaatgggagcactactctctggagggcgaaaaaggaacccgaaacattctcgacttgagcaatctaagagttgaaaccaccatcatgattgatggcaagcccgaacgcaggcaagtgctggtagatctgtccgaggtgaaggtgaaagataaggaaggaaattatactaaaccgaataagatgcagatcaaaatgcagcagatggcgtacgttcggaaactgcagttccagatgcaggcaaatcctaccgaggtgctcgagtggtacgagcagaaccctactgaagaacttatcataaagaaccttgtggacaaagagaatggagaaaaagggctcatatcattctatggcaccgccctggtcgaactggatcagaccctgccagtgtccaagacaaaagaaatgctcgaagagttcaaaatactaaagcagcgagaatcgaaaaaggaaaacgtacagaaggaactgaattctctgacccagttggaggcagttgactccttgaaggctgggatagttgccaatatggtgggtgtaatctcctatatcttgaaaaccctggattacaatgcttacattagcctggaggatctgtccactgcgcagagttctccggagttcgcaagcggcataagcggagccattacaaagatgtcccgggaagaaggtagacgaattgacgtcgaaaagtatgccggtttgggtctgtacaatttctttgagatgcaactgctgcgaaaattacaccatattcagaccgattctggtaatatactgcacctcgtgcccgctttccgggcccaaaagaattatgaccacattatggtcggcaaagaaaagatcaagaaccagttcggcatcgtgttcttcgtcgatgccgctgcgacctccatcaaatgtcccagatgtggagccgtaaacaaggaagatttccacccagataagcagaaataccctgacgcagaaaaaggaccaaatttgcgcaatggcaaggaacagtctggcaaaaaggtctgggtcacccgcgataaagaagacgaagaccgcatcaaatgttactgctgtgggttcgatactaaagagaaaaatgaaggaaatcccttcatgtacatcaaatccggtgacgataatgccgcgtacctaattagcgatctgggggtcgagagctatcgaaaagcctacgaactggctgctaccgtggtagaggataggaagaagcac

SEQ ID NO: 187 - DNA, 3531 bp, Artificial Sequence
  Synthetic
  misc_feature: No2Mmc3 effector gene codon-optimized for human expression
atgctcaccaagctgggggacctcttcatgaagcagatcaaaaccaccaaggccattaggtttaagttggaaaatgacgataagaacaccattattaataactcaattaccaacctgaacagtagaaggaatttcgatctcaacctgttcgttgacgacctcgacacttttatcacagactgcaatgattacctgttttgtttcaaaaagaagggatgcagggaaatcttttacgttaacccgaatctgatagtgaagaacgagtggttgaagaaatatgcaaaacaggatttcgcaaaactaaaacagaatcatacagcacagagaatccagtataagattggagatatcgacgggctcaacctccggatacaggatctgattgacgatattgatgatatctacaccaagttatgcgatgatgcctccgccgagctgcacgagcgagctaagcgggcccatacagctctccttctgaaaaggctctcagccaacaacagtttgccttgtctggtgtccctgattaataacatcgtggataagaacgaaaaagataacctctcccttaagctcaagagctctgggaagaagctcttgtcccaactagagatcggactccaagagtacctccctgaacagtctagcggagtggccatcgcaaaggcctccttcaactactacactatcaataagaagccaatcgattacgacaggaagattgaggaactgtcacaaaacatgagtacctctctggatgagtggaagaagaagtggcaattcaacaaagggctgtgggaactgatcgaaattaagtccgagggaaagaccctgtacctgggcgattccccattcagtgacgatggcgagtatgcgtcactcaggctgatcctgaagaacattctcgctgagcagaaggctaggttttctgagatgatgcaagataatgtttcatacgaggagctgaaagactctgacttgttcctctttaacaacatctcggaggacgagtacgatgagtacttggacctcacaaatcaaattgaggagctggcaactgaaatcaaccaggaagatgacgagtgtaagaaaaaggatctgaggtccgatctgatgaagttgaagaaagaaagagggagccttattaacgcggctgacaaaaagactaaggatcgcttcaagacttataagacgttcgccgacttttatcggaaagtctcccaaaaacacgggagggtgttggctaagctcaagggcatcgaaaaggaacgaacagagagtcagctgttgcagtactgggctctaatcctggaagtgaacaatcagcacaaacttgtgctgatccccaaagaaaaggctcaagagttcaaaagccgcttaaccaagtccaatgacaagaagtctaccattaagctttactggttcgaatcattcactttccggtccctccagaagttatgctttggaaacatcgaaaatggctcaaataccttctaccctagaatcaagaaggagctgcagtataagtactccaccaccgaccggaatggatatccccagttcatcgcaggcgagttcgagtttaagggagacgagcagaaaaagatccaattttataaggatgtgcttaatacaaagtatgcgcagtcagcactcagctttccggtcaacgaagtgaagaggaatatcattgataaggatttcgagacactggatgactttatcattgctctcgaacagatttgttaccagagatatgttagcgtcaacccccacttgattaatgctctgtctgaaaacttcaatgcacagatccttgacattacttctttggacctgcggaatgagtcgaacgtgaaggataaagacgtagcctactctcatgatgacaaaattcacacaaaaatctggaggcagttttggtccgtggacaatgagaagaacggcttcgatgttaggctgaaccccgagatcactatcacttatcgtaagcccaaagaatctcgcgtgattaagtacggcaacgacagtgaactgtacgatgcgaacaaaaagaatcgctaccttcacgatcagcttactctggtgacaacaatcagtgagcattctaactcaccggccaagaacctgagcttcaccaccgaatctgagcttaaagacatgattgagcgattcaattctgagatcaaaaaggagaaaatcaagtttgcgttcgggattgataatggggaggtcgaactgagcactctgggcgtataccttcccgactttaagcaggatagtaatgaggcaacatttgcggagctgaagaaggtggacaagtatgggttcaaggtgcttgaaattaagaacttactgtatagcgaaaaggactataacgggaaggaacgaaagattatccagaacccctcatacttcctgaacaaggaattatattgccgtaccttcaacaaaactgaatcggaatacgagaagatgttcgaaaatgtatttgaggaaaaacacctgctcaccttggaccttagcacagcaaaggtaatcaatgggcatatcgtaactaacggcgacgtggtgagtctattcaacctatggatgagacatgctcagcgaaatatctatgagcttaatgaccatgccgataaagaaacttccaaggagctcatccttaagaaaagtgaagatttgaaccaatgtgagcggagaaagctgatagactatctcaacaagaacaacaacaaatacgacgacctctctgaaaacgaaaaatctgattacatcgaatgggtgtacaaaatatggaacggcgagcactccgagtatggtaaaaacaaaagatttgcggatatctctaaagggcagagggtgggtgactacctcaataacgtgcttatggctgtcgtgcacgaaaaggggcagattgaatctgtcatcgacatctttgacattcggcacgtttttaagttccgaaaagacttctattcccttaagtctgagaaggagatgctggacgccatcaatcggtacaatgtgaagaatattagcgacgaggaactcgacctgaagtacaatgacattaagaaggcccttgtggctaacgtcgtaggggtggtcgacttcctatacaaacagtacaagagccgcttcggcggagagggaattgttgtgaaagagggcttcgactcatcaaaagttgagtcagacagggagaagttctccggcaacatctacagatttctggagagaaagctgtaccagaaatttcagaattacggcctggtaccccccattaagaacttgatgctgataagagatgcccgcttaaaccacgccaacgatttcatgcgattagggaacatttgttttgtggggtttgagggcacttcacagaactgtccagtctgcgagaagggccgtcttagacacggcgaaacctgttctaataattgcggttttgagtctaaagggattatgcatagtaacgatggcatcgccggctacaatatcgcaaagcggggattcaataactttaacgag

SEQ ID NO: 188 - DNA, 3807 bp, Artificial Sequence
  Synthetic
  misc_feature: PcMmc3 effector gene codon-optimized for human expression
atggagaatatcaagaacgagtaccagctgtccaagaccctgcgcttcgggctaacgcaaaagtgtaagaagcgtaagaagaactacgatggtgagatatacaagtcccacatcgagctgaacgatctggtgaatatatccgaaaagaggataaaggagtctctcccagcagcagacaaggagagcaagcttaagttaagcgacaacatagaaaagtgcctgccgctgatcagcaatttcctcattaattggcaacaggtctatcaacgagatgaccagattgctctggacaaggattactataagatactctgtaaaaagattggcttcgatggcttttggaccgaaactaatagcagaacccagcagaaaattaagaagccgcaatctagagtcattgggctctcagagttggggaaaaggcacctggggaaagagcggaaacaatatatcctggactactggaaggataaccttctcaacgctgctgaaaagtacgagatcgtaaacgaaaagctgaagcagttccaagaggccctgagaatcaacaggactgataataagccaaatgaggttgagttacgcaagagttttctgtctctggtgcacattgtgtacgacaccctcaagccattatgcaacggacagatcctcttccccaagctggagaagctgaatagcaacaatcgaaatgacaaccagaagctgatcgaatttgctacggaccatcagtctaagagcgacttgctgagtgaagttaccgagatcaagaagtatttcgaggagaacgggggaaatgtgcctttttgtagagctacacttaaccctaatactgcggtcaaaaatcctaacagcactgacaacagaatcgagaaagaaattgagattctgggcttgagtaacatccttgaggaacacaagtcggtgctcttttatgataattatttggagggtttgtctgtaaactccaagaaagagactctgcaaagcaacgaccagaacaacttgattaccaaggggctcatgttcaagtacaagcctattccagccattgtgcagtacgagattgccaaaacactttctaagaaactgggcaagtcagaggaggatgtgcgcaatttcctgcgtgggatcggacaggccaagagccctgcaaaggactacgccgacctgcagaacaaaaatgacttcaatattgaggcctaccctttgaaggtcgcctttgattttgcctgggaagggctggcgcggagtatctaccatccagacgcctctttcccacttgaacagtgccggcggtttcttaacgataacttcggagtgaatgagacagatgacaacttccagttgtatgccaaactgcaggagctaagggactacttggccgcccttgagcacaataagctgaaggatgggacggaacaaatcaacgccgcgcgggagattatcaagtctctcgactggcagcgaatctttagtaatagggggaatggttacaaagagtccataactatatggctcaacaagtggaagcctaacctgcaagataacgacgatactgattttaaaacagctaaacagcagattggcctgttcaggggaggcttgaagcatcgagttaagtactacaacaagattacccaggcatacaagaatatcgctatgcccatggggagaacttttgcccagatgcgtgataagattactggcgcagctgagttgaataaggtgagccattatgccatgattatcgaggacagcaacgctgacaaatacatcctgctgcaggagttcaccgaaaattcagacgatcgaatatacgcaaagacaaatccgacacacagtaatggggacattaccgcatacaccgtcaacagtgtgaccagcggtgctatcgcaaagatgctcaggaaaaagcgattggagaacagaggagcgttgcgcaatccaaaccctatcgaagaatggaaaacttttatccggaacaaggactgggatgcagagtttcaactgaacctcaatggcaacaatctagaaaagctcatcaaagagattgatagtaagtgttacaagctgaacaagaagtacattaacaaggatactttagttgaccttatcaacaagaaaaactgcttgctgctaccaataattaatcaggacctggcgaagaaagagaagtcagaaatcaatcagtttactaaagactggaatgcggtgttcgccgagaacacgccatggcgcctgactccggagttccgggtcagctatcgccagcctaccccgggttatccaatctccgatattgatgataagcggtattcccgtttccagatgattggacacttcttgtgcgactacatccctaagagcaacaactatattagtacgaaggagcagatggcaatctataaagacgataaagagcaagagtctgccgtgaaaaattttcacgagaagttaagtgtaggcatagaggcggggaaacgaaatgacaccgctagtgagaagccgaaagaggagttttacgttttcgggatcgatcgcggtcaaaaagagttggccactctctgcgttattgatcataacaagaagatcatcggagacttcgaaatatatgtacgcagtttcaactcagatacaaagcagtgggaacacaagtttctggagaagaggcatattctagacttgagcaatttgagggtggagactacgctcagcattgatgggaaacctgaaaagcgtaaagtgcttgtggatctttccaaggttaaagtgaaggacaagaaccgtaacttcaccaaacccgacaaaatgcagatcaagatgcaacagttagcatacattagaaaactccagtttcagatgcagactaatccggagggggtgctcgcttggtacgagaaaaacagcacaagggaactgatgctgaaaaacttcgtcaaaaagtcagacgatgataataacgggttggtgagcttctacggggcagccgtagagaaactggagaataccctgcccattgaacgcatttcagagatgctgcaaaaattcgaccttctgaagaagaaggaaaaagaaggtgaagatgtgaaactccaaattgaccagcttgtgcagctggaccctgtggataacctcaagtccggggtggtggctaatatggtaggagttatagcatttctgctacagcagttcaagtaccaggtgtacatctctctggaggacttgtccaaccctttctcttcacagataaccggcgggattacaggcgtccctcttagcgtttctaaaggggaagggagacgcgtggatgtggagaagtatgctggcctgggcctgtacaacttcttcgaaatgcagctcctgaagaagttgtttagaatacaacagaactcagagactattctgcacttagtgcctgccttccgcgctcagaaaaattatgatcacgaagcagtgggcaaggggaagatcaaaaatcaatttgggatcgtgttcttcgtggatgccaatgccacaagcaagacatgccccgtgtgcggaactacaaataagtctcccaacaagaaagaatatcccaccgccagaaagggcatttcccaggaaggcaaagaggtctggatcgagagggacaaaagtggggggaatgatatcatccgatgcttcgtttgcggttttgatacgaccaagaagtataccgagaatcccctgcagtacattaagagcggtgacgacaacgccgcatatctgattagcgcggaggggatcaaagcgtatgagctggctaccaccctgaccgataataag

SEQ ID NO: 189 - DNA, 3870 bp, Artificial Sequence
  Synthetic
  misc_feature: Sv2Mmc3 effector gene codon-optimized for human expression
atgaagaaaaacgagaataagtatcaactcagtaaaaccctccgtttcgggcttactcttaaagaaaagatttctaataatgagaaaacgccatatcagagccattcccagttccgggaccttataatcctctctgagaatcgtatcagggaaggcataagtacacctcagaatcgtgatctcccaagcttcattcaccggattcagaattgcacggatttcatcaatgattttatccacgactggtggatgattctcatgcacactggccaaatcgagctggacaaggactattataagtctctcacgaaaaaggtcggtttcgtcggtttctggtataaggagaacaagaagaaaggcgggaaaaccaagcaaccgcaggccagaaacataccaatgggggagttacggcacctgtgtccccagaatacaaaagaatgtgccacctatattacagactactggaaggatctgctgataacagccgctaataagctccacgagtccagcgaacaacagaagaaattcatcaaggctatggaacaaaacaggaccgacaacaaacctaatgagattgatctgaaaaagagcttcctgagcctggtgtccgttacaatggagctcttgaacccaattcttaatggccagattctgtttaacaagatggatcgtttggatatgagtaagaaatcggataatgacttcatcgatttcgtcaacgaccacgaaactgtacgggagttgaacaacgatatcgaggaaattatagccgattttaaggagaatggcaataatgtgaattattgtaaagctactctcaaccaggatacagccctaaaacagcataataacaatataccgaacgacatcgccaccgatcttgaggagctcatgatagacagtatcgtggggaattacgacgatgtgaacagcttcatggacaactgcgtttcaaacctgagtgcgaaggaaaagatccgtatcataaaggactcgaatataagcctcatctaccgggccattctgttcaaatacaagatgatcccagccaatgtcagacgagacatcgcgcagggcatggccaaaaagctcaacaaagatgaggaaaatatctacagttttctgtgcgagttcggcaccctacgcacccctcaaaaagattacgccgatctgaaggacaaggactctttcaacttggacaattaccccctgaaagtggcatttgacttcgcctgggaggggcttgccaaagcccagcaccatgaccagtccgacttcccattcgatctctgccggaacttccttcaggagaacttcgacgttaatctggaggaaaaccaagacttcctgttgtacgcagacctgattgagctgaatgcgctgctgtccaccctggacaagggcaatccggccgatccggacagtatcaaagaaaaggtccttgatatggtcgagcacatcaaatggaactctctcctgaacccacaaaaggtcaatgagtataaaaagaaagtaacttactacaagaatattataaagaaccgtcttaattttagcaagggcaatgaaacatacgagcgcattaagaaagagatcgccatgtcacgcggcagccttaaaaacaaaatcgagaagtatgacgatctgacctcacaatataaaagcattgccattgacctggggaagaagttcgcatctctgagggataagataattggagctaatgaagataacaaggttacccattatgccatgattcttgaggattcaaactgtgacaaatatcttctgttgcaaaaggtgtcaaacaacgaggatgacatctaccattacatgtcttacgatagctccgatcctaaaacttattatgtggattcggtgacctcttccgctattgccaagatgatacgcaaagagacatatcagtcgaagaaaaaccagtccaagatcaaagagtatgccaaactggaggaaaaagaacgggagcgaaggtatgtggaggattggtgcaggttcatccgtcgaaagaaatacgataatcgctataacctaaacattaacaatgggctgagttttgaagctctgaagaaagagattgacagcaagtcctacattctggttaagaagaacatatcggtggacagtatccgcgagcttgtcgagaatgaaggatgcctcctattccctatcgtaaacaaggacttgacaaaggagcgcaagacagaggataaccagttcacaaaggactggaacatgatattctccggcagtgagactaactggcggctcaccccggagtttagagtgacataccggaaccccgttcctggctatccgaatgacaagtttggaagtaaaagatactcccgatttcagatgaacgcacactttgtttgcgatttcatcccctccagcaatagttataccagcaaccgagagcaaatcgctattttcaaggatgaaaatgaacagaagaaaagggtagaggagttcaacaggacactctctaatatcaaccagaagttctatgtcattgggattgatcgtggacagaaggaactggccacattatgcgtcgttgaccaggacaagaagattcatggcgatttcaaaatctattcacgtaagttcaactccgagcggaaacagtgggaacactatagcttggaaggagaaaagggcacacggaacatacttgaccttagtaaccttcgggtggaaaccactatcatgattgatggcaagccagagagacggcaagtgttggttgacttgtcagaagtgctagtcaaagataaggacggtaactatactaagccaaataagatgcagatcaaaatgcagcagatggcgtacgtacggaagctgcagttccagatgcaggctaatccaacggaagtattagagtggtacgagcagaatccaactgaggagctgataatcaaaaacctggtagacaaagagaacggggaaaaggggctcattagcttctacggagccgctctggtggaacttgatcagacgctgcctgtttctaaaattaaggaaatgttggaagagtttaaaatactgaagcaacgagaatccaagaaagagaatgtgcagaaagagctgaactcgctgactcagctggaggcggtggactcgcttaaagctggtattgtggcaaacatggtgggagtgatttcttacatcctaaagactttggattacaacgcttatatatctcttgaggacctttccaaggcacaatcttctcccgagtttgcttcagggatctcaggagccataaccaaaatgtccagggaggaggggcgcaggatcgatgttgagaaatatgcaggactggggctctataactttttcgagatgcagctgctgcgtaagctgcataggatccagaccgactccggaaacattttgcacttggtgcccgccttccgcgctcagaaaaattatgaccatattatggtgggcaaggagaaaatcaagaatcaattcggaatagtgttctttgttgatgcagccgcaacctccattaagtgcccacgatgcggtgctgtcaacaaggaggacttccaccccaacaagcagaagtaccctgatgcggagaaagggcctaagctcaggaatgggaaggagcagtccggacaaaagggtgtgtgggtaacgcgggacaaggaagatgacgataggatcaaatgctattgttgcggtttcgacacaaaagagaaaaatgaggggaacccctttatgtacatcaagagtggggatgacaacgctgcctacttaatctccgacctgggcgtggagagttacagaaaagcgtacgagctggccgcaactgtagtagaggacaggaagaagcat

SEQ ID NO: 190 - DNA, 134 bp, Artificial Sequence
  Synthetic
  misc_feature: AsCpf1 crRNA expression cassette for human cell lines
gtcaaaaagacctttttaatttctactcttgtagatcacttataatctactcgttcaccaatctgtcaaaaagacctttttaatttctactcttgtagatccaatgagctccatagcttcaaatgttgtttttt

SEQ ID NO: 191 - DNA, 134 bp, Artificial Sequence
  Synthetic
  misc_feature: CrpMmc3 crRNA expression cassette for human cell lines
ctctacaactgataaagaatttctacttttgtagatcacttataatctactcgttcaccaatctctctacaactgataaagaatttctacttttgtagatccaatgagctccatagcttcaaatgttgtttttt

SEQ ID NO: 192 - DNA, 134 bp, Artificial Sequence
  Synthetic
  misc_feature: NapMmc3 crRNA expression cassette for human cell lines
gtctagaccacaaatttaatttctactattgtagatcacttataatctactcgttcaccaatctgtctagaccacaaatttaatttctactattgtagatccaatgagctccatagcttcaaatgttgtttttt

SEQ ID NO: 193 - DNA, 134 bp, Artificial Sequence
  Synthetic
  misc_feature: ObpMmc3 crRNA expression cassette for human cell lines
atcgaacagactcataaaatttctactgttgtagatcacttataatctactcgttcaccaatctatcgaacagactcataaaatttctactgttgtagatccaatgagctccatagcttcaaatgttgtttttt

SEQ ID NO: 194 - DNA, 134 bp, Artificial Sequence
  Synthetic
  misc_feature: SfpMmc3 crRNA expression cassette for human cell lines
gtctaaaccgacccaataatttctactgttgtagatcacttataatctactcgttcaccaatctgtctaaaccgacccaataatttctactgttgtagatccaatgagctccatagcttcaaatgttgtttttt

SEQ ID NO: 195 - DNA, 134 bp, Artificial Sequence
  Synthetic
  misc_feature: ShMmc3 crRNA expression cassette for human cell lines
gtctataaagacaaaataatttctactattgtagatcacttataatctactcgttcaccaatctgtctataaagacaaaataatttctactattgtagatccaatgagctccatagcttcaaatgttgtttttt

SEQ ID NO: 196 - DNA, 134 bp, Artificial Sequence
  Synthetic
  misc_feature: SmpMmc3 crRNA expression cassette for human cell lines
gtccaaaggacggattaaatttctactattgtagatcacttataatctactcgttcaccaatctgtccaaaggacggattaaatttctactattgtagatccaatgagctccatagcttcaaatgttgtttttt

SEQ ID NO: 197 - DNA, 134 bp, Artificial Sequence
  Synthetic
  misc_feature: No2Mmc3 crRNA expression cassette for human cell lines
gtctataaagacgttttaatttctactattgtagatcacttataatctactcgttcaccaatctgtctataaagacgttttaatttctactattgtagatccaatgagctccatagcttcaaatgttgtttttt

SEQ ID NO: 198 - DNA, 134 bp, Artificial Sequence; identical to SEQ ID NO: 157
  Synthetic
  misc_feature: PcMmc3 crRNA expression cassette for human cell lines

SEQ ID NO: 199 - DNA, 134 bp, Artificial Sequence; identical to SEQ ID NO: 158
  Synthetic
  misc_feature: Sv2Mmc3 crRNA expression cassette for human cell lines

SEQ ID NO: 200 - protein, 1250 aa, Smithella sp.
  misc_feature: Smp2Cpf1 effector
MKTLFENFTNQYSVSKTLRFELIPQGKTRDFIEQKGLLQQDEDRAEKYNKVKKTIDEYHKNFIEKSLNGLKLEGLEQYKTLYLKQEKDDKDKKLFDKEKENLRKQIANAFRNNEKFKTLFAKELIKNDLMNFACEEDKKNVKEFEAFTTYFTGFHQNRANMYVADEKRTAIASRLIHENLPKFIDNIRIFEKMKNEAPELLSSFNQTLKDMKDVIKGTTLEEIFSLDYFNKTLTQSGIDIYNSVIGGRTPEEGKTKIKGLNEYINTDYNQKQTDKKKRQPKFKQLYKQILSDRQSLSFIAGAFKNDTEILEAIEKFYVNELLHLSSEGKSINVLDATKNAVSNLESFDLTKIYFRSGASLTDVSKKVFGDWSIINRALDNYYATTYPIKPREKSEKYEERKEKWLKQDFDINLIQTAINQYENETVKEKNSGKVIADYFAKFCDDKETDLIQKVNEGYIAVKDLLNTPYPENEKLGSNKDQVKQIKAFMDSIMDIMHFVRPLSLKDTDKEKDETFYSLFTPLYDRLTQTIALYNKVRNYLTQKPYSTEKIKLNFENSTLLGGWDLNKETDNTAIILRKDNLYYLGIMDKSHNRIFRNVPKADKKDSCYEKMVYKLLAGANKMLPKVFFSQSRRQEFSPSAKLLENYKNETHKKGDNFNLNHCHELIDFFKDSINKHEDWKNFDFRFSATSAYADLSGFYHEVEHQGYKISFQSAADSFIDDLVNEGKLYLFQIYNKDFSPFSKGKPNLHTLYWKMLFAEENLKDVVYKLNGAAEIFYRKLSIAAKNRTVHKAKEILQNKNPDNPKATSKFDYDIIKDKRYTLDKFQFHVPITMNFKAEGIFNMNQRVNQFLKANPDINIIGIDRGERHLLYYTLINQKGKILKQDTLNVIANEKQKVDYHNLLDKKEGDRATARQEWGVIETIKELKEGYLSQVIHKLTDLMIENNAIIVMEDLNFGFKRGRQKVEKQVYQKFEKMLIDKLNYLVDKNKKANELGGLLNAFQLANKFESFQKMGKQNGFIFYVPAWNTSKTDPATGFIDFLKPRYENLKQAKDFFEKFDSIHFNSKADYFEFAFDFKNFTEKADGGRTKWTVCATNEDRYAWNRALNNNRGGQEKYDITAELKSLFDGKVDYQSGKDLKQQIASQESADFFRTLMKYLSVTLSLRHNNGEKGEAEQDYILSPVADSMGKFFDSRKAGDDMPKNADANGAYHIALKGLWCLEQISKTDDLKKVKLAISNKEWLEFAQTLKG

SEQ ID NO: 201 - DNA, 28 bp, Escherichia coli
  misc_feature: LacI_array_target 1
ctcgagtgcaaaacctttcgcggtatgg

SEQ ID NO: 202 - DNA, 28 bp, Escherichia coli
  misc_feature: LacI_ array_target 2
gcggtatggcatgatagcgcccggaaga

SEQ ID NO: 203 - DNA, 28 bp, Escherichia coli
  misc_feature: LacI_ array_target 3
aataggcgtcgaggcctttgctcgagtg

SEQ ID NO: 204 - DNA, 28 bp, Escherichia coli
  misc_feature: LacZ_array A_Target 1
caacgtcgtgactgggaaaaccctggcg

SEQ ID NO: 205 - DNA, 28 bp, Escherichia coli
  misc_feature: LacZ_array A_Target 2
gccagctggcgtaatagcgaagaggccc

SEQ ID NO: 206 - DNA, 28 bp, Escherichia coli
  misc_feature: LacZ_array A_Target 3
atgttgatgaaagctggctacaggaagg

SEQ ID NO: 207 - DNA, 28 bp, Escherichia coli
  misc_feature: LacZ_array B_Target 1
caacgtcgtgactgggaaaaccctggcg

SEQ ID NO: 208 - DNA, 28 bp, Escherichia coli
  misc_feature: LacZ_array B_Target 2
ctgtgtgaaattgttatccgctcacaat

SEQ ID NO: 209 - DNA, 3723 bp, Artificial Sequence
  Synthetic
  misc_feature: BdMmc3 effector, codon-optimized for Nannochloropsis
atggagaactacatcaacaagtaccagatctccaagacgctgcggttcgggttgatcgccaatgagaggaaggtgaagaaggagaacgagcacaagatcaagcaagagaacctgtacaagagccacagtgagctgaaggacctgatcgagatttccgagaagaacatcaagaagaacctgcccaagaacgccgtgcaagcccaattgcccatcaacacgatccggaagtgcatcgacgagatcaaggagcacctgaagtcctgggagcaagtgcatacgaggtacgaccaaatcgccgtgctgaaggacttctaccggaagttggagaggaaagcccggtttgacgggttctggaaggacaagaatcgggtgaggcagcctcagtcccaagagattacgttgtccagcctgaagtacaagtacgagaacaaggagatcaaggaccacatcatcgggtactgggccaagaatatccggaagacgaaggagaagctgaacgaggtggacatcgtgttgcagcggtttgaagaggcccggaaggagaataggacggacaagatgctgaacgaggtggagttgcggaagctgttcttgagcttgaccagcctggtgaacgaggtgttagggcctttgatccgacggtccatccaattcccgaatgccgagaagttgacggagtccaatgaggacaagaaggtgaaggagttcgccttcaacgggaagaaggagaccctgtttgactccatcatcgtgctgaaggcctacttccaagagaatggggggtacgtgccctacggaagagtgacaatgaacaagttcacggccctgcagaagcccaacaaaacagatggggagatcgacgaggtgatcaagacgttgaagctgaaggagttcctgagcgagtacaaggacatcaccagcttggaccggaagttggaaagctccaaggacaagaaggacgccctgaaggacaacagcttgagcttgatcgagcgggtgcaatacttcaagtacaagacgatccccatcggggtgcaattcgccttgtccgaatacctgtccaagaacgagatcgagcagaagcggatcttcgagctgttggagtccatcggaaagcccaaaagccctgccaaggattacgccgatctggagaacaagaacgacttcgacctgtacaagtacccgctgaaagtggccttcgactacgcatgggagtccttggccaagtacgagtaccacaagaacatcgacttccccaaggacaagtgcaagttcttcctgaaggacacgttcaacttcgacacggacaacaaggacttcaagctgtacgccgacctgctgtttatccgggagaatttggccacgctggactactccaaccccaatgacaagaacgtccacatccggaacatcagcagtgcgtttgacaagatcgactcccggttgaaccagaagcagaaatccgccacgaagaacatcctcgcctggcataaggggaacctgtccaaagagatcgtgtaccagaacgccaagcaagagatcggacggttgagaggagggctgaagaacaaagtgtccgacttcctgagcttgacgaacatcttcaaggagatcgcccccgagtttggacggcaatttgccaatttgcgggacaagttcaacgaggagaacgagatcaacaagatcagccactacggggccatcgtggaagactccaataaagaccggtacctgctcatctacccgctgaatgacgacagagacggagtggacacgatatttccggaggacggaaaggtggggttcaagatgtacatggccaagtccttgacctccaagaccctgtggaagttcatctgcaaccagaagggggtgtccgaggactttcacaagaaggacaagaagtggaacatccccaagacgcagttcgggaaagtggacaaagccaagctggacgaggactacaacctgaagaacgtgatcgactgcctgcagaactccaacatggccaaagcccagaagtggaacgagttcggatgggacttcacgcactgtaggacgtactccgacatcgagaaggaggtggaccggaaaggacacttgctgaaggacaacaaccacatctccatggagaagctggaggagctgatcaacaaggaccggtgcttgttgctgcccatcgtgaatcaagacctgatccggcaagaccggatccccaagaatcagttcacgaaggactggtccaagatcttcacgtccgaccgatcctaccggttgcatcctgagttcaacgtgtcctaccggcatgcaacgcccaattaccctaagcctgaggagaagcggtactcccggttccaaatgatcgcccacttccaatgcgagatcgtgccccaaatcgacaactacatctccaagaaggagcagatcaagatcttcaacgacaaggagatccagacgaacgaggtggccaagttcaacaacaacctgatcatctccgaggactacatgatcttcgggatcgaccgggggttgaagcaattggcaaccttgtgcgtgctggacaagaacgggaagatccaaggggacttcaagatctacacgcggtacttcgacacggacaagaagcagtggatccacgagttgctggagaagaagcgggacatcttggacctgtccaacttgagagtggagacgacaatccggggggacaaagttttggtggacctgaatgaggtggaggtgaaggagaaggacaaggaggacaagtacaagaagaaccccgacgggacgtacgtgtacacgaaggagaatcagcagaagatcaagctcaagaagctggcctacatccggaagctgcagttcaagatgcagaccgagtcccagaaggtgctggattttgccaagcagaacacgacggagcaagccgtgatcgagaacatccagaacctgatcagcccctacaaggaggggaagaactacgacgacttgcctgcagacgtgatcctgaacatgctccagcagttcaaggagttcagcgagaatgccgacacgcagagcattagggagctgattgagttggacgccacggacaacctgaagtctggagttgtggccaacatgatcggggtgatcgtgtacctgctgatggagaagtacaacgggaaggccatcatcgccttggaggacttgacaagggccttcagcttcagcaaggacgggttgaatgggtacgcgttgtttgggacgaactacgacgagacagtggacttcaaggagcaagagaacctggcattggccggaactggaacgtaccagttcttcgagatgcagctgctgaagaagctgttcaagatcgggcaagagcagaacgtgttgacggttcctgcgtttaggtccgtggacaactacgagaagatcgtgaggcgggacaagcagaattccggagacgagttcgtgaactacccgtttgggatcgtgacgttcgtggaccctaagtttacctccaagcggtgccctaagtgcggaaagacgaacgtgaaccggaaggacaacatcgtgacgtgcaaggacaagaactgcgggttccagacgaaggacgggaatagctttgaggccaacaacatccacttcatcacgaacggggaccagaatgggggataccatatcgccttgaaggccctgaagaacatcaacatcaaggacaaccagaacaaccacgactaa

SEQ ID NO: 210 - DNA, 147 bp, Artificial Sequence
  Synthetic
  misc_feature: Encodes NLS, peptide linker, FLAG tag
atgcccaagaaaaagcggaaggtcggcgactacaaggatgacgatgacaagttggagcctggagagaagccctacaaatgccctgagtgcggaaagagcttcagccaatctggagccttgacccggcatcaacgaacgcatacacga

SEQ ID NO: 211 - protein, 49 aa, Artificial Sequence
  Synthetic
  misc_feature: NLS, FLAG tag, peptide linker
MPKKKRKVGDYKDDDDKLEPGEKPYKCPECGKSFSQSGALTRHQRTHTR

SEQ ID NO: 212 - DNA, 1000 bp, Nannochloropsis gaditana
  misc_feature: RPL24 promoter
aataagcatacatcatatgaatacaattcagcttaaatttatcatacaaagatgtaagtgcagcgtgggtctgtaacgatcgggcgtaatttaagataatgcgagggaccgggggaggttttggaacggaatgaggaatgggtcatggcccataataataatatgggtttggtcgcctcgcacagcaaccgtacgtgcgaaaaaggaacagatccatttaataagttgaacgttattctttcctatgcaatgcgtgtatcggaggcgagagcaagtcataggtggctgcgcacaataattgagtctcagctgagcgccgtccgcgggtggtgtgagtggtcatcctcctcccggcctatcgctcacatcgcctctcaatggtggtggtggggcctgatatgacctcaatgccgacccatattaaaacccagtaaagcattcaccaacgaacgaggggctcttttgtgtgtgttttgagtatgattttacacctctttgtgcatctctctggtcttccttggttcccgtagtttgggcatcatcactcacgcttccctcgaccttcgttcttcctttacaaccccgacacaggtcagagttggagtaatcaaaaaaggggtgcacgaatgagatacattagattttgacagatatccttttactggagagggttcaagggatcaaatgaacagcgggcgttggcaatctagggagggatcggaggttggcagcgagcgaaagcgtgtccatccttttggctgtcacacctcacgaaccaactgttagcaggccagcacagatgacatacgagaatctttattatatcgtagaccttatgtggatgacctttggtgctgtgtgtctggcaatgaacctgaaggcttgatagggaggtggctcccgtaaaccctttgtcctttccacgctgagtctcccccgcactgtcctttatacaaattgttacagtcatctgcaggcggtttttctttggcaggcaaag

SEQ ID NO: 213 - DNA, 317 bp, Nannochloropsis gaditana
  misc_feature: terminator 2
agtgatgcggcctttaggaaacaccacaaaagtaattgacaatctcaggaacgatctgcgtgtttacagcttcccaaataacaattataccacgtaccaaaaggggtttaatgtatctcacaaattcttctaataggtacagcttctcaaattgggtgtatgatgtgacacttcgtctcacacacgtcacgataattcagcgtatggcttcccttcatcacattcacgcaaacttctacacaaccctgggcatatttcttgtgttggcaacactcccgaaatcgattctgcacacaatggttcattcaatgattcaa

SEQ ID NO: 214 - DNA, 28 bp, Nannochloropsis gaditana
  misc_feature: CC1 spacer
aacgcttccagcaagcgacagcattagt

SEQ ID NO: 215 - DNA, 28 bp, Nannochloropsis gaditana
  misc_feature: CC2 spacer
cgatgtagcctaggaagaattccacttt

SEQ ID NO: 216 - DNA, 28 bp, Nannochloropsis gaditana
  misc_feature: CC3 spacer
tggctccgctgaaatcactgacctcccc

SEQ ID NO: 217 - DNA, 44 bp, Artificial Sequence
  Synthetic
  misc_feature: HH ribozyme sequence
cgactactgatgagtccgtgaggacgaaacgagtaagctcgtct

SEQ ID NO: 218 - DNA, 68 bp, Artificial Sequence
  Synthetic
  misc_feature: HDV ribozyme sequence
ggccggcatggtcccagcctcctcgctggcgccggctgggcaacatgcttcggcatggcgaatgggac

SEQ ID NO: 219 - DNA, 1000 bp, Nannochloropsis gaditana
  misc_feature: EIF3 promoter
tcataatcaaagatgagccagccacgaagctaccggagaattctgtaagaaaaatgtttaaagttgaaaatgctaacagtgaagtgatatccttttttaatggagtgttgaggtgaagtctagcatcgtaggggaaaacaggattctgtgtcttccattctactccttgataaagcgaagaaatccgacaaaaccaaagagattgttcaagtttaagatttgtaagcgtacaactatgaacttcttctctttgtaggcctgagtggtcgtatgcatacgattcatgaagtgaatcagtatcgctggattttgcttaggagtaaagcacaactaagaaaatatgctgcctggcaggcatcctgagacatgaggcaagcgacgtagcaattgaatcctaatttaagccagggcatctgtatgactctgttagttaattgatgaaccaatgagctttaaaaaaaaatcgttgcgcgtaatgtagttttaattctccgccttgaggtgcggggccatttcggacaaggttctttggacggagatggcagcatgtgtcccttctccaaattggtccgtgtggtagttgagatgctgccttaaaattctgctcggtcatcctgccttcgcattcactcctttcgagctgtcgggttcctcacgaggcctccgggagcggattgcgcagaaaggcgacccggagacacagagaccatacaccgactaaattgcactggacgatacggcatggcgacgacgatggccaagcattgctacgtgattattcgccttgtcattcagggagaaatgatgacatgtgtgggacggtctttacatgggaagagggcatgaaaataacatggcctggcgggatggagcgtcacacctgtgtatgcgttcgatccacaagcaactcaccatttgcgtcggggcctgtctccaatctgctttaggctacttttctctaatttagcctattctatacagacagagacacacagggatc

SEQ ID NO: 220 - DNA, 163 bp, Artificial Sequence
  Synthetic
  misc_feature: Terminator 9
gagtcaagggggaaggtgcatagtgtgcaacaacagcattaacgtcaaagaaaactgcacgttcaagcccgcgtgaacctgccggtcttctgatcgcctacatatagcagatactagttgtacttttttttccaaagggaacattcatgtatcaatttgaaat

SEQ ID NO: 221 - DNA, 3723 bp, Unknown
  Unknown bacterial species
  misc_feature: BdMmc3 effector gene
atggaaaattatataaataagtatcaaatttcaaagactttgcggtttggattgatcgcaaatgaacggaaagtaaaaaaagagaatgaacataaaatcaaacaagaaaatttgtataaaagtcattcagagctaaaagatttgattgaaatttcagagaaaaatatcaaaaaaaatcttccaaagaatgcagtacaagcacaattaccaataaatactattcgtaaatgtattgatgaaatcaaagaacatcttaaatcatgggaacaggttcatacaagatatgatcaaattgcagtcttaaaagatttttatcgaaagttggaaagaaaagccagatttgatggtttttggaaagataaaaatagagtaaggcaaccacaatcacaagaaataacactttcatcactaaagtacaaatatgaaaataaagaaatcaaagaccatattataggatattgggctaagaatatcagaaaaacaaaagagaagttaaacgaagtggatatcgttttacaaagatttgaagaagcaagaaaggaaaacagaacggataaaatgctaaatgaagtagaacttcgcaagctatttttatctctgaccagtcttgttaacgaagtattggggccattaattcggcgctcaatacaatttcctaatgcagaaaaactaactgaaagcaatgaagataaaaaggtaaaagaatttgctttcaatgggaaaaaagagactttatttgatagcataattgtattgaaagcttattttcaggaaaatggcggatatgtcccttatggacgcgttactatgaataaatttacagctttacaaaaaccaaataagacagatggagaaatagatgaagtgattaaaactctaaagctaaaagaatttttgagcgaatataaagatattacatcacttgaccgaaaacttgaatcttccaaggataaaaaagatgcattaaaagataattctctttcgcttattgagcgagtgcaatattttaaatataaaacaatcccaataggcgtacagtttgctctatccgagtatttatcaaaaaatgaaattgaacaaaaacggatttttgaattacttgaatctattggaaaacctaagagtccagcaaaagactatgcggatttggaaaacaaaaatgactttgatctatataaatatccattaaaagtagctttcgattatgcgtgggaatcgttggcaaaatacgaatatcacaagaatattgattttccaaaagacaaatgcaaattttttctgaaagacacattcaatttcgatacagacaataaagactttaagctatatgctgatcttttatttattcgtgaaaatcttgcaactttagattacagtaatccgaatgataaaaatgtgcatatcagaaatatttcaagcgcttttgacaaaattgatagcagactaaatcaaaaacaaaaatcagcaaccaaaaatattcttgcgtggcataaaggtaatttaagtaaagagattgtttatcaaaatgcaaaacaagaaataggcagattaagaggtggattaaaaaataaagtttctgatttcttatctcttacaaacatttttaaagaaattgctcccgagtttggcaggcaattcgcgaatttacgtgataaattcaatgaagaaaacgaaataaataagattagtcattatggagctattgttgaagacagcaataaagacagatacttgctgatttatccattgaacgatgatcgcgatggcgttgatactatatttccagaagatggaaaagttggatttaaaatgtatatggcaaagtctttgacttcaaaaactttgtggaaatttatctgtaatcaaaaaggagtaagtgaagattttcataaaaaggataaaaaatggaatatccccaaaacacaatttggaaaagtagataaagccaaactggatgaagactacaatcttaaaaatgttatagattgtttgcaaaattcaaacatggcaaaagctcagaaatggaatgaattcggttgggattttactcattgtagaacctactctgatattgagaaagaagttgacagaaaaggacatcttctaaaagataataatcatatttcaatggaaaaactcgaagagttgatcaataaagacaggtgtctattgctcccaatcgttaatcaagatttgattaggcaagaccgaatacctaaaaatcagtttacaaaagactggagcaagatttttactagtgatcgaagttatcgtttacaccctgaatttaacgtgtcgtatcgtcatgcaacacctaattatccaaaaccggaagaaaaacgctattctcgttttcaaatgattgctcattttcaatgtgaaattgttcctcaaattgacaattacatctctaaaaaagagcaaattaaaatctttaatgataaagaaattcaaactaatgaggttgcgaaattcaacaataatttaattatatccgaagattatatgatttttggtattgacagaggattaaaacaattagccacactatgtgtgcttgataaaaatggtaaaatacaaggtgattttaaaatttacacaagatattttgatactgataaaaagcaatggatacatgaattgcttgaaaagaagcgtgatattttggatttatccaatttgcgagttgaaacaactattagaggcgataaagttttggttgatttaaacgaagttgaagttaaagaaaaagacaaagaagataaatacaaaaaaaatccggatggaacatacgtatacacaaaagaaaatcaacagaaaataaaacttaaaaagcttgcatatatccgcaagttgcaatttaaaatgcaaaccgaatcacaaaaagtattggattttgccaaacaaaatacaactgaacaagcagtaatagaaaacattcagaatttgatttccccttataaagaagggaaaaactatgatgatttaccagcagatgtcattttgaatatgttgcaacaattcaaagagttttcagaaaatgcagatactcaatctatacgggaacttattgaattagatgctactgataatctaaaatcgggagttgttgccaatatgattggggttattgtttatttattaatggaaaaatataatggtaaagcaataattgctcttgaagatttgacacgtgcatttagtttttctaaagatgggttgaatggttacgcgttatttggaacaaattatgatgagactgtggatttcaaagagcaagagaacttggctttagccggtaccggaacttatcaattcttcgaaatgcaactcctgaaaaaactatttaaaattgggcaagaacaaaatgtattgacagttccggcttttcgaagtgtggataattatgaaaagattgttcggcgcgataaacagaatagcggtgatgaattcgtcaattatccatttggaatagtaacttttgttgatccgaaatttacttcaaaaagatgtccgaaatgcggtaaaacaaatgtgaataggaaagataacatcgttacttgtaaagataaaaattgcggttttcaaaccaaagatggaaattcttttgaagctaataatattcatttcattacaaatggcgaccaaaacggtggttatcacattgcattgaaagctttgaagaatattaatattaaagataatcaaaataaccatgactaa

SEQ ID NO: 222 - DNA, 3894 bp, Sulfuricurvum sp.
  misc_feature: SfMmc3 effector
atggaaaacattaaaaatgggtaccagctatcaaaaacattacgctttgggttaacacaaaagtgcaagaaaagaagaaaaaattacgagggtgaaatttatgagagtcataaagagttaaatgatttgattatgttttcagaagaacgtattaaacaatcattatctattgataaaaaatccgaattgcaattctccataaataatatagaaaaatgtttgcttctagtagataatttcttttttagttggcaacaagtttatcaaagagacgaccaaatagctttagataaagattattacaaaatactttgcaaaaaaattggatttaatggattttggactgaaagaagacgggaacaaagagtaaaaaaaccgcaatcacgtgttatatctctttcagaactaaaaaaaccagatgaattagggaaaaaacgcttccaatatattttggactattggagagaaaatctattaaatgtagcagaaaaatacaatgttgtaagtgaaaaattgaaacagtttcaagatgctttaaagattaatagaaccgataataaaccaaatgaagtagaactacgaaaatcgtttttatctcttttacatcttgttaatgatacccttatgcctctttgttacgggcagattttatttccaaagattgaaaaattagatagtagtaaaagccataatcaaaagttgattgaatttgcaaccgaccatcaatcaaaaagcgatttgctctctgagattacagagataaaaaaatattttgaagagaatggtggtaatgttcccttctgcagggcgacgttaaatccgaatactgctattaaaaacccaaaatcttctgataataaaattgaagaagaaataaatataataggactatcaaatattttaaaagagcataaatctgttctgttttatgataaatatcttgaggatttatcggttaaagaaaaaataaatttactaaaaaataaggattcaaatagtattactcgtagtttgatgttcaagtgcaaatcagtacctgctattgtacaatatgaaatagcaaagacgttaagcagaaaacttgataaaagtgaagaagatattcgcaattttctacgtggtataggtcaagctaaaagtcctgcaaaggattatgctgatttgcaaaataaaaacgactttaatattgaggcatatcctttgaaggtggcttttgattttgcatgggaaggattagcccgctctatataccatcccgatgcatcatttccgcttgaacaatgtaggcgttttttgaacgataattttggagtaaataaggaagataataatttccaattgtatgcaaagttgcaagaattaagagactatttatcagttttagaacataataaattaaaagatggtactgcacagattaacgctgcacgggaaataatagaatcgcttgattggcaaaaaaatttcggagataggggtaatggttataaaaggtcgataacagtttggttaaataaatggaagccaaatttgcaggataatgatgacacggattttaaaaccgctaaacaacaaataggtttatttagaggtagtctcaaaaataaaataaaaaaatattatgaaattactcaaacatacaaagatatagccatgcaaacagggcgtacctttgctaaaatgcgagataaaatatcaggggcagcagaacttaataaagtatcacactacgcaatgattattgaagatagtaatgcagataaatatgtcttactgcaagaatttacagaaaaaaaaggtgatagaatatatgcaaaaacggattataataatggtgatattactgcttatgccgttaattctgttacttccggagctattgctaaaatgattaaaaagaaaagattagatagctttaatgataaatatggagaaagcacgtttcagcagcaggaacttactaaagaacaaaaagaacaaaaaaatattagggagtggaaaagttttattgaagaaaaacgttgggatttggagtttaagttaaatactaaagtaaaaacttttgagcaacttaaaaaagaaatagattctaaatgttacgaattaaataagaaatatattagtagagatgtgcttgatgatttaataaataataaaaattgtttactgctcccaattgtaagtcaagatttagcaaaaaaagaaaaatccgaaataaatcaatttaccaaagattggaatgcagtgtttgcgcaaaatactccttggcgattaacacccgaatttagaatatcgtatagaaaaccaacgcctaattatccggagtctgataaaggcgataagcgttattctcgttttcaaatgattgggcatttcctttgcgattacattccgaaaaatgattattatatatcaacaagagaacagattgccatctataaagatgataaacaacaagaaactgctgtaaatagatttcatgataaattaaagggcagaactgaggctgaagagcatgttgactcgattaacgccctaattgcaaaatttggaagcgttaataaaaaacaaaaatctattgtagtagataaacctaaagaagaattttatgtatttggtattgatcgaggacaaaaagagttggcaacgttgtgcgtaatagatcataataaaaagattataggaaattttgatatttatgtccgttcttttaattccatatcaaagcagtgggaacataaatttttagagaaacgtcatatcttggatttatctaatctacgggtagaaacaacgctatttattgatgggaaacccgaaaaaagaaaagttttggtggatttgagtgaagtaaaagtaaaagataaaaatggaaattttaccaaacctgataaaatgcagattaagatgcagcaactcgcttatattcgaaagttgcaatttcagatgcagacgaatcccgatgtggtacttgcttggtatgaaaaaaattcaacaaaagagatgatgttgaaaaattttgtaaagaaatcagacgatgacaataatggtcttgtctctttttatggagctgctgttgaagaattggaaaatactttaccaatagaaaggataagtgaaatgcttcaaaaattcgacttattaaaaaaacaggaaaaagagggagaagatataaaattacaaatagacaaattggtgcaactggatcccgtagataacttaaaatcaggtgttgttgctaatatggttggtgtgattgcgttcctactacaacaatttgaatatcaggtatatatatcacttgaagatttatctgaaccatttagtaatcaaataacaggaggtataacgggtgttccgttgtcggtaagtaaaggagatggaaggagggttgatgttgaaaaatatgcaggattaggactttataatttttttgaaatgcagttattaaagaaactattccgcatacaacagaataatgaaactatattgcatttggttccggcttttagagctcaaaaaaattacgaccatgtggcagtaggaaaaggaaaaataaagaatcagtttgggattgtattttttgtagatgcaaatgcaacctctaaaacgtgtcctgtttgtggtacgacaaataataatccaaataaaaaagagtacccaactgctcagacaggaatttcacaagaagggaaggaggtatggatagaacgtgataaatcaggtggtaatgatattattagatgttttgtgtgcggttttgatacaacaaaaaaatatacagaaaatccattgaaatacattaagagtggagatgataatgctgcatatcttatttcggcaaaaggaatcaaggcgtatgaattagcaattacattaactgataataaataa

SEQ ID NO: 223 - DNA, 3858 bp, Sulfuricurvum sp.
  misc_feature: SvMmc3 effector
atgaaaaaaaatgaaaacaaataccagttatcaaaaacattacgttttggactaacactaaaagagaagatatcgaataatgagaaaacaccttaccaaagccattctcaattcagagatttaattatcctttcagaaaacagaatcagagaaggtatcagcactccacaaaaccgtgacttaccctcttttatccacagaattcaaaattgtaccgattttatcaatgatttcatccatgattggtggatgattctgatgcacacaggacaaattgaattggacaaagactactataaaagcctaactaaaaaagtgggatttgtaggtttctggtacaaagagaacaaaaaaaagggtggaaaaacgaagcaaccacaagccagaaacataccaatgggtgagcttagacatctttgtccccaaaatactaaggagtgtgccacatacatcaccgattattggaaagatcttttgataacagcagccaacaaactgcatgaaagcagtgaacaacaaaagaaattcatcaaagcgatggagcagaatcgcacggataacaaacctaacgaaatagatctgaaaaaatcttttttgagtctggtatctgtgacaatggaactgctaaaccctattctaaacgggcagatactattcaacaaaatggacaggctcgatatgtctaaaaaaagcgacaatgatttcattgatttcgtcaatgatcacgaaacggttcgtgaattaaacaatgacattgaagaaataatcgctgatttcaaagaaaacggcaataatgtaaactattgcaaagcgacacttaatccagacacagcattaaagcaacacaacaacaatattccaaatgatatagcaactgatttggaagagctaatgatggacagcatcgtcggaaattatgatgatgtcaactcttttatggataactgtgtttctaatttatccgcaaaagagaaaataagaataatcaaagactccaatataagccttatttatcgcgctattctcttcaaatacaagatgattccggcaaacgtaagaagagatatagcccaaggaatggccaaaaagatcaataaagacgaagagaatatctacagttttctatgcgagtttggcactttgcgtactccacaaaaagactacgctgatctgaaggacaagaacagtttcaatctcaacgactatccattgaaagtggcatttgatttcgcatgggagggattagcaaaagcccagcatcacgaccaatctgattttccttttgatctgtgtcgtaattttctacaagaaaattttgatgtgaacttagaggaaaaccaagattttcttctgtatgcagatcttattgagttaaacgccttattatcaactctcgacaaagggaatcctgcagaccccgactcaataataaaaaaggcattagacatggtcgaacaaataaattgggattcttttgacgaaaaaagaggaaacgaatacaaaaaaagaggaaacgaatacaaaagagtaatcataaaccgtctgaacttttcgaaagacgatgagaaatacgaaagaataaaaaaagagatttccatgagccgtggacgtcttaagaacaaaataaaaaaatatgacgatctcacatctcaatacaagcgtattgccatggatttaggaaagaaattcgcctctttacgagacaaaattatagatgcgaatgaggataacaaggtgactcactatgcaatgattcttgaggattccaattgcgacaaatatctcttgttgcaaaaagtaagcaataatatcgaagataacatttatcattgtatgagttacgattcttcagatcccaaagcttactatgtcgactctatcacatcttctgcaatagcaaagatgatcagaaaggaaacgaatccatccaagataagagagtatgctgaattagaagagaaagaaagagagagacggaacgttgatgattggtgcaggtttataagcaaaaaagaatacgacaggaggtatcagttgaatattaacaatggtttatcttttgaggcactaaaaaaagagatcgattccaagagttatattttggtgaaaaagaacattagtgttgattctatccgtgaacttgttgaaaatgaaggatgccttcttttccctatcgtcaataaagacctcacaaaggaaaggaaaacaacagaagacaatcaattcacaaaagattggaatatgatattctctgggtctgaaaccaattggagattaacccctgaattcagagtgacgtatagaaatccagtaccaggatatcctaatgacaaatttgggtcgaaaagatattcaagattccagatgaacgctcattttgtatgcgattttattccatcctctaattcatacacatccaacagagaacaaatcgccatattcaaagacgagggagaacaaaaaaagagagtagaggaatttaatcgcaccctatcaaacatcaatcaaaaattctatgtcattggtattgatagaggacaaaaagagcttgccacactttgtgtcgtcgaccaggataagaaaatacacggagattttaagatctacactcgccaattcaattccgaaagaaagcaatgggagcattattctctcgaaggagaaaaagggacaagaaacatccttgatttatctaacctccgtgttgagacaaccattatgattgatggcaaaccagaaaggagacaagtacttgtcgatctgagtgaggtgaaggtgaaggataaagaaggaaattacacgaagcccaacaagatgcagatcaaaatgcaacaaatggcttatgtgcgaaaacttcagttccaaatgcaggcaaatcctaccgaggttttggaatggtatgagcagaatccaactgaagagctgatcataaagaatctcgtcgacaaagagaacggagaaaagggacttatctctttctacggaacagcacttgtagaactagaccagacacttcccgtctcaaaaacaaaagagatgctcgaggaatttaagatactgaagcaaagagaaagcaaaaaggagaatgtgcaaaaagagctgaatagtcttacacaacttgaagctgtcgacagtctgaaagcaggaattgtcgcaaacatggttggcgtgatctcatatatcttaaagacactggattataatgcctatatctcactcgaagatttgtctacagcacaatccagccccgaatttgcaagtggaatatcaggagcaatcaccaaaatgtcgagagaagaaggaagaagaatagatgtggagaaatatgccggtcttggattgtataatttcttcgagatgcaattgctacgaaaactacaccacatacaaacagatagcggaaacattctccatcttgtcccagctttccgtgcccaaaagaattacgaccacatcatggtaggaaaagaaaaaataaagaaccaatttggaatcgtgttctttgtagacgcggcagctacatctatcaaatgtccacgctgtggtgctgtcaataaggaggatttccatccagataaacaaaagtacccagatgcagaaaaagggccaaatttgagaaatggcaaggagcagtcaggcaaaaaagtatgggtaacaagagacaaggaagacgaagaccgtatcaaatgctattgctgtggattcgacacaaaggaaaagaacgaaggaaatccttttatgtatatcaagagtggcgacgacaatgcagcctatcttatatcagacttaggagttgagtcttacagaaaagcttatgaattagctgcgactgtagtggaagacagaaaaaaacattaa

SEQ ID NO: 224 - DNA, 3102 bp, Unknown
  Unknown bacterial species
  misc_feature: NapMmc3 effector
atggaaaattcaaatttatatcaagtcgttaaaacgattcggtttaaactagagccagttggaaagatggacacgcctaaatttggcgacaaaaacgcagagtcaaaggcaaatttgaccccgtttattgagcttgttaaaaagacgatgacaaacgtcaaagctttggtttttagcaagcaagacggcgaggacggtgaaaaatggcgtaaaattttggaggtaaattatagatttttacggagctatcttaaaaattcgttttacgaaaacagaggcgattcgcaagaaaaatcaaaaaaacataaaatttctgatttggagtatttgcaaaaggcgttagaaaatctttttgcggagtttgacgaaattttagacggattagaagattttgaaaaacgcaacacaaaaaaccaatacgaaaaacagcgccacgcacaagcgggacttttgctaaaccgcctttgtaagcgaagtaactttgggtttttaaaagcctttgtgggagcacttgcgcagactaacaagcctttttttgacgataaaacagataaactaaaaaagcagatagacaaatttgaaacagagctagaaaaacaaaaagaatttttcttgccataccaaagcaacggcgttctttttgctggcggttcgtttaaccgctacgccataaacaaaacgccaaaaatgcttgacaaggagctgagagaagagcagacaaatttaaaaaagagtctttgtgagcacaaaattaaaatcgatacactcaacactcttggtttaaaaaacgactgtccttgcacgagtttagacaactcttacacgtttatcaaagactacaaagctaagcaaaagtcaaaatttatcgagcttgtccaaaagggcgaatttgatgaggcaaaaaaggtaaatttgtttgagtgtagcgaaacggattttgaaacatttaaaactcgaacaaagcagattcaaaacgaaaaagacaaagacgagcgaacaaagctaaagcaaaagcgaggagaattttttaagtctcaaaagcgaggaaaattttttaagtctcaaacgcaaaactacgaaaatctttgcgacttatacaaaaaaatagcccaaaaacgagggcagatagtggctaaaatttgtgccattaaaaaagaaaaagagatgtgcgagcaggtgaagtattggtgcgtggcactagaaaaaggcggcgagttttatctttatatgtttttgcgagatgaaaacgataacatcaaaaacgcttacgactttgtctctaaacttcaaacgcaaaaaagtggtgaaacaaaacttcactactttgactctttaacgctaaaagcagttagaaagctttgttttaaagagacggatggcagttttaaaaaagcgctcaaaaatgtaaaatttccagagtgcgagcaaaatctagacgaaaaagtgaaaatttctttttaccaaaatgtcttaaaaaatgccaaaacgctaaatttgtctaaatttgaaaatttacagagcgtaacggagggcaaatttgagtcattgagtgaattcgaagtggcgctaaacatggtttgttacacaaagaccgtttgtgtttcagagagcgtagaaaaagagcttaaaaaattcaaaccgcttgtttttcacataacttcgcaagatttggcggcaaaaagagagaaaaaagcgcacacgcaaatttggcatgagttttggcgtgagagtaacgaaaaaagtaagtttccgttacggctgaatcctgaactgaaagttatgtggcgtgaggcgcgtccgagcagagtcgaaaaatacgccgaacaaagcgacaaatttgaccctaacaaaaagaatcgttacttgcatccgcagtttacacttgcgttaaactttacgcaaaacgctcacaacgaagcgataaatttggcttttaaagatgtacaaaacaaaggcgaagcggtgaaaaagtttaacgagaattttaaaagtagcgaatacgcttttggcatcgatgtgggcacgaaagatttggctttgctttgtttgatagacaaaaacaaaaaaccagtaaattttgacgtttatgaaatttgcaacgagaatgaaatttgcaacgagaagttaggttttgaaaaatttggtttttacaaagatggcacacggcgagacgagccatacaaactcataaagaatccatcgtattttttaaacgagtctttgtataaaaagacctttaacgctacgaaagaggagtttgaaaggagttttagcgagctttttaagcgcaaaagcgtttgtgcgctggacttgactacggcaaaagtcatctgcggaaagataattttaaacggcgactttagcacgcacctaaatttaaaaattttaaacgcaaagcggaaaatttcggctaagctgaaaaaagatccaacgcttaaaattgaatacgacaatgacgacaatattttgtttggtagcaatgtgattttttattataacaataagtatgaaatagttcgaccatacgatgagataaaaaacgaaattttcgaatttcacgaaaaacaaagacttgacgatgcaaggctagaagataacataaacaaaacgcgtgcgaatcttgtggcaaatatggtgggcgtgattagctttttgcataaagaattttctggttttgttgtgctggaaaatttaaaacagagcgagatagagggaaatcataggcttaaatttgaaggcgacattacgcgtccgcttgagctagcactttaccgcaaatttcaaagtaagtgtttaacgccgccgataagtgagcttattaaactaagagaaggtgaaaaaaatgaaaacgttgaaagtgatttgattttgcagtttggtattattaaatttgtagataaagacaaaacaagtcgtttgtgtccagcgtgtggcaaagatgcgtatgaaaataataattccaaatataagacagataaaaaagacggagtttttgaatgcgctggatgcggttttaacaacaaaaacaacgctggcgactttgccgcgctagacacaaacgacaagatagcgacgtttaacatcgcaaaaagaggcttgtaa

SEQ ID NO: 225 - DNA, 3564 bp, Smithella sp.
  misc_feature: ShMmc3 effector gene
atggttgcaattgatcgaaataaaaataataaaataggaggaataattatggaaaacaattatcaaattacaaaaactattagatttaaacttgaaccggaaaatgtttcttttaatgaatatggtatcggaaggaatgatgaattttcgttacagtcttttgtgtgtatgttaaatgattatttgggattgtgtaatgaatttcttttttatgaaaaagatggtgaatttaaaattaaagataaacttataattaaaaatgaatggataagaacatttcaaaggtatgaatatgtacagttgttggcaaagaaaaaagcaacaaataataatgatagaagaaataataggagagttcaaactacaataggtgatattcaaaatctaacagagaaaatagaaaaagtatttgattgtgttgatgaaatatacgctgatttaacaaaagatgcttcggctcaacttaatgaacgagcaaaaagagcaagaacggctcttttgctgaaaagattaaaggcaaaacaagcattaccatatttaatttctcttatggagaatatttctgataagaatgaggataataatttgagtttaagattaaaaaatgccggtttagcattacaaaaacaattagatattgctatacaaaaatatttaccggaacaatccggcggcttgccaatagcaaaagcaagttttaattattatacaataaataagaagccggttgattattctcttataataaaagagttggaaaacagtctgtgttttgatttaaacgatggaaagaatatattagatagtaaaattaaagaagatgtaaaaaataggctcaatgggaaaaaactacttattggagatgctccaatgataagtatagatgattatgtaagtcttcgtcaaatactaaaaaatataaaatcagagcaaaaaaaagcattttctgagtttatgcaaataaaaccatctttagagactttgcgaacaatgaaagatttatatttatttaacaatatttctcaagatgaatttaacgaatattactatttaactcaagatattgaagatgtgtcgattgaagtaaatcaatgcacaaacaatgaaaaaaagaaattgctaaaaagtaagcttcaagcatttaaaaagaagcgaggtgcattaattaatgctgctgataataacactagaaataaatttatagattataaaaaatttgcaacgttttatagaaaaattgcacaacaacatgggcgcatattggctcaattaaaaggggttgaaaaggaacaagttgaatcgcagttattaaactattgggcaatgattttagaagacaacaaccaatataaacttgttttaataccaagagagagagcatctgaatgtaaacaaagagtagaaagaaatcagataaccggcagcggaaaaaaactttattggtttgaaagtttcacatttagaagtcttagaaaattatgctttggaaatgtggagaatggtactgatagtaatactttttatccggaaataagaaaagaactttctcgtaaatattacacggaagataaggacggcaatcggaagtttataaaatctgaagccgattttaagggagacgaccagaaaaaaattgctttttataaagatgtattaaatactaactatgcaaaacaaacactgatatttccaaaagaacgagttaaaaaagatattattaattcagaattttctactttagaagagttttctattgcacttgaaaaaatatgctataaccgctttgttaccgttagtgagaatatgataaataacttatctagttatgactctcaaatatttgatattaaatcattagatttaaataatcagttaaatacccaaaataaagatgaaaaatatttgcacaatgataaaaatcatacgcgaatatggaaatatttctgggacaacaataatgaaattaataattttgatgtaagattaaaccctgaaattacaattacttataggacacctaagcaaagtaggattgataaatatgggaaagattcacaaagatttgattctaataaaaataatcgatatttacatgaacaatatacccttgtaatgacaatgtctgaacatagtaatacacctaaaaaagacctgtcatttaaagcagagaaagaatttgaaaatgaaataaataattttaataataactttaataacaaggaagttaagtttgccttaggtatagataacggagaggtggaattatctactttgggggtttatttgcctattttcagccaaggttcaaaagagatgataatagatgaattaaaaaaggtaaaccaatatggttttaagactttaaccataacagacctctcttataaagaaacagatgttaatggtaaagataaacggataattgtaaatccatcttattttttgaataaagagctttattgtcgcacttttgggaaaaataaagatgattataaagagatgtttgaaaaactgtttgccgtaaagtatttgttaactcttgatttaactacagcaaaagtaattaatggtcatattgtaacaaatggagatattcctacattttttaatctttggcttaggcatgcacaaaggtatatttatcagatgaatgataaagctaaagatgaaacagcaaaaaaaatcattttaaaaaaatgcaatgaactaaatgatttagaaaaaaggaaattcatagattttcttaatgttggtaataaaaaatataaggagttaacagatgatgaaaagaactcttatacgcaatggatatatcaatattggaatggttcgaacgaagaaaatgatgattttaatgaagttaagagaaaacaacgtgtgggtaattattcttatgatgttctatttgctgtttgttatattggcgaagatattgagaaagttatagtcatttttgatgtgcgtaatatattcaaacttagaaaagatttctattcaataaaatccgaaaaagagatatttgaagaaatagataaatataatttgaatcgtaccatatcggatgaagagttagatttaaaaatggtaacgctcaaacaagctcttgtggcgaatgcagttggagttattgattatttgtataagcagtataaagatcgattcggcgggcatggtattatcgtaaaagagggatttgataatggaaaggtagaacaggatagagagaagttttcgggaaatatttatcgtattttagaaagaaaattatatcaaaaatttcaaaattatggattggttcctccgataaaaaatttattatccatacgtggaaagggattgggtgataacgaaaaaaatattttacagataggaaatgtttgttttgtcagtgctactagaacaagtcagcaatgtcctatttgcgaaggtaaatttgcgcaaaatcatgggactatttgtacctcttgtggatataacatagaaaacatcatgcactcaaatgatggtattgcgggttataatatagcaaagcgtggctttaaaaattttttaaataataaataa

SEQ ID NO: 226 - DNA, 3519 bp, Unknown
  Unknown bacterial species
  misc_feature: NoMmc3 effector
atgaataatataaagacaacaaaagcaataagatttaaactcgaaaactctgctagtaatagagaaatacaagaacgtataaataatctaagttcaaataatggtttcgacctggtatcttttgtaactgaattagataattatatagacaacttagaaaactatctattttataaaaaaggtgagtatctttacatgaaggataaaattatcttgaaaaaagaatggatgaaaaactatggtaagcaagagcttgcagagtttaaaaacaaaaataacaaaccaacaaaaggagcaagagtgcaatataaagttggcgaatataaagtagaattgaaaatacaagatgctttcgataatatagatgaaatatatggcgagctttgtgatgatgcttcgagggaacttaatgaaagatctaaacgcacacgaacagcgttgctattgaaacgtttgtatgccaaaaataatttgccactacttgtagattttgtagaaaattcgatatctaaaaaggaattagggaatgatagtttgatgttgaagtcgatgggaaaacgattgatggaacatcttgaattgggcattcaggaatatttgcccgaacaatcggccggtgtgtctattgccaaagccagctttaactactatacaataaataaaaagtctattgattatgataccaagatacaagaaatagaaagaaacttgtttgttaataatatagaccgaatttggaatgatagggataataagataaaagacaatgataatgttaaggcagatattgcaagccgacaaaataataaaccattgtgcattggcgactctccttttatggatgttgatgaatatgcaagtctgcgacagatattgaaaaatatattgtcggaacaaaaggctgattttaataaacttatgcaacaaggtggtagttacaaagaattgcaaaatactgatttgtatttgtttaaggatattacaaaggatgagtttgataagtatagcgaacttacagaagatatagaagaattagcaacaaagcggaatcaaactaagaacgagcaaaagaagaaagaactgaagtcgcagattgaaatattggcaaagcaacgtggaagttttataagcgaagcagataaaactacagaaaagatgtttaaaacttataaggctttttcggtattatacaaaaaaatagctcaaaagcatggtaaagaattggctaaactgaaaggtatagagaaagagaaagcagaatcgcaaacattgcaatattgggctatgattcttgaaaaagataatagacacaaactggtgttgataccaaaagcgaaggcaaacgaatgccgaagccgattggtagaggctgacaacgccaatggaaacataaaattatattggtttgaaagttttacttatcgcagtttgcaaaaactatgtttcggaaatatcgaaaatggaagtaatacgttctatccgcaaataagaagagatagtatgcttagcagtaaatactctactcgtgatagaaatggttattataaattcatatcaggagaatatgagtttgcaggtgacgaacaacgtaagatacaattctatcaagatgtattgagaaccgactatgcaaaaaagaatttgaatttgcccaaccgtgaggtaaaagaaaagattataaactcaactttcgaatcgcttgatgattttaagatagcattggaaagcatttgttaccgtagagcggtatgtaccaatattcatttgatagatgctttggaaagtgagtttggtgctcaagtttttgacattacatcgttggatttgcgaagagaggataatataaaagataaagaagagaagtattcgtattcctacaaatctcacactgctgtatggaaagaattttggactgcggagaacgagaagtctaattttgatatacgactaaatcccgaaataagcataatataccgcaaagccaaggaaagcagaatagaaaaatatggtgccgatagcaaaaagaataatagatatttacatgatcagctgacgttggtaactacattgtcggaacattgcaattcgcccgaaaggaatattgcttttgcaactatcgacgatgaaaagagaataatagctgaattcaatagcaagttggataaaaaaaatattcgttttgcttttggtatagataatggcgaagtagaactttctactttgggtgtatatttgccacaatttaagcaggatagtattgaaagttcgcttaaagaggtgactaatgtagataagtatggttttgatacattaactatacgcagcttgatgtattccgaaaaagatgtgaatggcagagatagacgaattattgataacccatcttattttttgaaagaagatttgtattgtcgtactttcggaaagaatggcgatgaatacaaggctatgtttgataaagtgtttgaacaacggcggttgttgacgttggatttgagcacagccaaagtgatatgtggtaggatagtaacaaatggagatgtgatttcgctatacaacttgtggatgcgacatgcacaacgcaatatatacgatatgaacgaacatatagaaggtggcggagcaaaagtgtatttgaagaagagcgaggttctaaacgacaatgaaaaacgtaagtttcttgactacttgaatgatggaaatgaaaaatatgaaaaattatcggatgcagataaaaaagattatatagattggatttatcagatatgggatgggaaggaagttgaaaataagagatttgcaaaagtaaatagggatcaaaagagaacgggtttctacttccacaatgtgctattggcagcaagctatataggcgaagaagttcaagatgtgaaagatattgccgatatagaagatataagacatgtatttaaatttcgtgaggatttcaaacaatttaagccggaaaatgaaatgcttgacgagattaacaaatacaatatcaaagtaatttcgaacgaagaattggatttgaaacttaatcagttgaagtcatcgttggtggccaatgtgataggtgtgatagactatctgtataagcaatataaggaacgttttggtggcgaaggtattattgccaaagaaggttttggtatgagtacggttgaaggtgctagaatgaagttttcgggaaatatatatcgtatgcttgaacgtaaactatatcagaaattccaaaattatggtatggtgccacctatcaagaatttgacagcgtttagagaagatgatcatgctaacaagaataaccaatacacccaaataggatatatatgttttatcgattacgctggtacaagtcaaagatgtcctatatgtgataccaagttggcatataaccatgggacggaatgttcggcaaaatgtggctttgatagcgaaggcataatgcattccaacgatggaatagccggctacaatattgccaaaaaaggatttgaaagtattactaataattaa

SEQ ID NO: 227 - DNA, 3810 bp, Porphyromonas sp.
  misc_feature: PcMmc3 effector
atggaaaacatcaaaaacgagtatcaactctcaaaaacattacgctttggattaacacaaaaatgcaagaaaagaaaaaaaaattatgatggtgaaatctataaaagccacatagaattaaatgatttggttaacatttcagaaaaaagaattaaagaatcactacctgctgctgataaagaatctaaattgaagctctctgataatatagaaaaatgtctgcctctgataagtaattttcttattaattggcaacaagtttatcaaagagacgatcagatagccttagataaagactattacaaaatactttgcaaaaaaattggatttgatgggttttggactgaaacaaacagtcggacacaacaaaagataaaaaaaccgcaatcacgtgttataggtctttcagaacttggaaaaaggcacctaggcaaagaacgcaaacaatacattttggactattggaaagataatctattaaatgcagcagaaaaatacgagattgtaaatgaaaaattgaaacaatttcaagaagctttaaggattaatagaaccgataataaacccaatgaagtagaactgcgaaaatcgtttttgtcgcttgtgcatattgtttacgatactcttaaaccactttgtaacgggcaaattttatttccaaaactcgaaaaattaaatagtaataatagaaatgataaccaaaaattgattgaatttgcaacagatcatcaatcaaaaagtgatttgctttctgaagtaacagagataaaaaaatattttgaagagaatggaggtaatgttcctttctgtagggcaacgttaaatccaaataccgctgttaaaaacccgaattctactgataatagaattgaaaaggagattgagatattaggattatcaaatattttagaagaacataaatccgttctgttttatgataactatcttgagggtttatcggtgaactctaaaaaagaaacattacaaagcaatgatcagaacaacttaattactaaaggactaatgtttaaatataaacctattccggctattgtacaatatgaaatagcaaagacattaagcaaaaaacttggtaaaagtgaagaagatgttcgcaattttctacgtggtataggtcaagctaaaagtcctgcaaaagattatgccgatttgcaaaataaaaacgactttaatattgaggcatatcctttgaaggtggcttttgatttcgcatgggaaggattagcccgctctatataccatcccgatgcatcatttccgcttgaacaatgtaggcgttttttgaacgataattttggagtaaacgagacagatgataatttccaattgtatgcaaagttacaagaattaagagactatttagcagctttagaacataataaattaaaagatggtactgaacagattaacgctgcacgggaaataataaaatcgcttgattggcaaagaattttcagcaataggggtaatggttataaagagtcgataacaatttggttaaataaatggaagccaaatttgcaggataatgatgacacggattttaaaaccgccaaacaacaaataggtttatttagaggtggtttgaaacacagggtaaaatattacaacaagatcactcaagcatacaaaaatatagccatgccgatggggcgcacctttgctcaaatgcgagataaaataacaggggcagcagaacttaataaagtatctcattatgcaatgattattgaagatagtaatgcagataaatatatcttactacaagagtttacagaaaatagtgatgataggatatatgcaaaaacaaatcctactcatagtaatggtgatattactgcctacacagttaattccgttacttccggagctattgctaaaatgttacggaagaaaagattggaaaacaggggtgctttgagaaatcctaatcctatcgaagaatggaaaacgtttattcggaataaagattgggatgcagaatttcaattgaaccttaatggtaacaatcttgaaaaactcataaaagaaatagattccaagtgttataaactaaataaaaaatatattaacaaagatacacttgtagatttgataaataaaaaaaattgtttgctgctcccaattataaatcaagatttagcaaaaaaagaaaaatccgagataaatcaatttaccaaagattggaatgcagtgtttgcggaaaatactccttggaggctaactccggaatttagggtttcttacagacaaccaacacccggctatcctatatcagacattgatgacaaacgctattcacgctttcagatgattggacatttcctttgcgattatatccccaaaagcaacaattatatctcaaccaaagaacaaatggctatctataaagacgataaagaacaagaaagtgcagttaaaaattttcatgaaaaactaagcgttggaattgaagcaggaaaacgaaacgatactgcatctgaaaaacctaaagaagaattttatgtatttggcattgatcgtggacaaaaagagcttgcaacgttatgcgtaatagatcataataaaaagattataggagattttgagatttatgttcgttcttttaattccgacacaaaacaatgggaacataaatttttagagaaacgtcatatcttggatttatctaatttacgggtagaaacaacgctatctattgatggaaaacccgaaaaaagaaaagttttagtagacttgagtaaagtaaaagtaaaagataaaaacagaaattttaccaaacctgataaaatgcagattaagatgcaacaactcgcttatatccgaaagttgcaatttcagatgcagacgaatccagaaggggtacttgcttggtatgaaaaaaactcaacaagagagttgatgttgaaaaattttgtaaagaaatcagacgatgacaataatggtcttgtctctttttatggagctgctgttgaaaaattggaaaatactttaccaatagaaaggataagtgaaatgcttcaaaaatttgacttattgaaaaaaaaggaaaaagagggagaagatgtaaaattacagatagaccaattggtgcaattggatcctgtagataatttaaaatcaggtgttgtcgccaatatggttggagtaattgctttcttactacaacagtttaaatatcaagtatatatatcacttgaagatttatctaatccatttagtagtcaaataacaggaggcataacgggggttccgttgtcggtaagtaaaggagaaggaaggagggttgatgttgaaaaatatgcaggattaggtctttataatttttttgaaatgcagttattaaagaaactattccgcatacaacagaatagtgaaactatattgcatttggttccggcttttagagctcaaaagaattacgaccatgaggcggtaggaaaaggaaaaataaagaatcagtttgggattgtattttttgtagatgcaaatgcaacctctaaaacgtgtcctgtttgtggtacgacaaataaaagtccaaataaaaaagagtatccaactgctcggaaaggaatttcacaagaagggaaggaggtatggatagaacgtgataaatcaggtggtaatgatattattagatgtttcgtgtgcggttttgatacaacaaaaaaatatacagaaaatccattgcaatacattaagagtggagatgataatgctgcatatcttatttcggcagaaggaatcaaggcgtatgaattagcaactacattaacagacaacaaataa

SEQ ID NO: 228 - DNA, 3121 bp, Sulfuricurvum sp.
  misc_feature: Sf2Mmc3 effector
atggaaaacatcaaaaacgagtatcaactctcaaaaacattacgctttggattaacacaaaaatgcaagaaaagaaaaaaaaattatgatggtgaaatctataaaagccacatagaattaaatgatttggttaacatttcagaaaaaagaattaaagaatcactacctgctgctgataaagaatctaaattgaagctctctgataatatagaaaaatgtctgcctctgataagtaattttcttattaattggcaacaagtttatcaaagagacgatcagatagccttagataaagactattacaaaatactttgcaaaaaaattggatttgatgggttttggactgaaacaaacagtcggacacaacaaaagataaaaaaaccgcaatcacgtgttataggtctttcagaacttggaaaaaggcacctaggcaaagaacgcaaacaatacattttggactattggaaagataatctattaaatgcagcagaaaaatacgagattgtaaatgaaaaattgaaacaatttcaagaagctttaaggattaatagaaccgataataaacccaatgaagtagaactgcgaaaatcgtttttgtcgcttgtgcatattgtttacgatactcttaaaccactttgtaacgggcaaattttatttccaaaactcgaaaaattaaatagtaataatagaaatgataaccaaaaattgattgaatttgcaacagatcatcaatcaaaaagtgatttgctttctgaagtaacagagataaaaaaatattttgaagagaatggaggtaatgttcctttctgtagggcaacgttaaatccaaataccgctgttaaaaacccgaattctactgataatagaattgaaaaggagattgagatattaggattatcaaatattttagaagaacataaatccgttctgttttatgataactatcttgagggtttatcggtgaactctaaaaaagaaacattacaaagcaatgatcagaacaacttaattactaaaggactaatgtttaaatataaacctattccggctattgtacaatatgaaatagcaaagacattaagcaaaaaacttggtaaaagtgaagaagatgttcgcaattttctacgtggtataggtcaagctaaaagtcctgcaaaagattatgccgatttgcaaaataaaaacgactttaatattgaggcatatcctttgaaggtggcttttgatttcgcatgggaaggattagcccgctctatataccatcccgatgcatcatttccgcttgaacaatgtaggcgttttttgaacgataattttggagtaaacgagacagatgataatttccaattgtatgcaaagttacaagaattaagagactatttagcagctttagaacataataaattaaaagatggtactgaacagattaacgctgcacgggaaataataaaatcgcttgattggcaaagaattttcagcaataggggtaatggttataaagagtcgataacaatttggttaaataaatggaagccaaatttgcaggataatgatgacacggattttaaaaccgccaaacaacaaataggtttatttagaggtggtttgaaacacagggtaaaatattacaacaagatcactcaagcatacaaaaatatagccatgccgatggggcgcacctttgctcaaatgcgagataaaataacaggggcagcagaacttaataaagtatctcattatgcaatgattattgaagatagtaatgcagataaatatatcttactacaagagtttacagaaaatagtgatgataggatatatgcaaaaacaaatcctactcatagtaatggtgatattactgcctacacagttaattccgttacttccggagctattgctaaaatgttacggaagaaaagattggaaaacaggggtgctttgagaaatcctaatcctatcgaagaatggaaaacgtttattcggaataaagattgggatgcagaatttcaattgaaccttaatggtaacaatcttgaaaaactcataaaagaaatagattccaagtgttataaactaaataaaaaatatattaacaaagatacacttgtagatttgataaataaaaaaaattgtttgctgctcccaattataaatcaagatttagcaaaaaaagaaaaatccgagataaatcaatttaccaaagattggaatgcagtgtttgcggaaaatactccttggaggctaactccggaatttagggtttcttacagacaaccaacacccggctatcctatatcagacattgatgacaaacgctattcacgctttcagatgattggacatttcctttgcgattatatccccaaaagcaacaattatatctcaaccaaagaacaaatggctatctataaagacgataaagaacaagaaagtgcagttaaaaattttcatgaaaaactaagcgttggaattgaagcaggaaaacgaaacgatactgcatctgaaaaacctaaagaagaattttatgtatttggcattgatcgtggacaaaaagagcttgcaacgttatgcgtaatagatcataataaaaagattataggagattttgagatttatgttcgttcttttaattccgacacaaaacaatgggaacataaatttttagagaaacgtcatatcttggatttatctaatttacgggtagaaacaacgctatctattgatggaaaacccgaaaaaagaaaagttttagtagacttgagtaaagtaaaagtaaaagataaaaacagaaattttaccaaacctgataaaatgcagattaagatgcaacaactcgcttatatccgaaagttgcaatttcagatgcagacgaatccagaaggggtacttgcttggtatgaaaaaaactcaacaagagagttgatgttgaaaaattttgtaaagaaatcagacgatgacaataatggtcttgtctctttttatggagctgctgttgaaaaattggaaaatactttaccaatagaaaggataagtgaaatgcttcaaaaatttgacttattgaaaaaaaaggaaaaagagggagaagatgtaaaattacagatagaccaattggtgcaattgg

SEQ ID NO: 229 - DNA, 3127 bp, Sulfuricurvum sp.
  misc_feature: Sf3Mmc3 effector gene
gtgcaaaaaaagaaaaaaaattatgagggtgaaatttatgagagtcacaatgagctaaatgatttggttaggatctcagaagaacgaattaaacaatcattatctattgataaaaaatccgaattgcaattatctatgcctaatgtagaaaaatgtctgcatctgataaataattttctcattagttggcaacaagcttatcaaagagacgaccaaatagccttagataaagattattataaaatactttgcaaaaaaataggatttgatggattttggactgaagaaaatagacggacacaacaaaagataaagaaaccgcaatcacgtgttatatccctttcggagcttaaaaaatcagatgaattaggtaaagaacgcattcaatatattttggattattggagagataatctattaaatgcagcagaaaaatacgagcttgtaagtgaaaaattgaaacaatttcaagaagctttaaagattaatagaacagatagcaaaccaaatgaagttgaactacgaaaatcgtttctgtctcttttacatattgttaatgatgcccttatgcctctttgttatggacaaattttgtttcctaagactgaaaaattagatagtagtaaaggtcataatcaaaaactgattgaatttgcaacagatcatcaatcaaaaagtgatttgctttctgaaattacagagataaaaaaatatttcgaagagaatggaggtaatgtccctttctgtcgggctacgttaaatccaaatacagctcttaaaaaccctaaatcttctgataataaaattgaagaggaaataaatatattaggactgtcaaatattttaaatgaacataaatctgttctgttttataataaatatcttgaagatttaccaactaaagaaaaaataaaattgctaaaaaataaaaatttaaattatattacacgtagtttgatgtttaaatataaatcagtccctgctatcgtgcaatatgaaatagccaagacgttaagtacgaaaaatggtaaagctgaagaagatttgcgcatttttttacgcggtataggtcgggctaaaagccctgcaaaagattatgccgatttgcaagataaaaacgactttaatattgaggcataccctctaaaggtggcttttgattttgcatgggaaggattagcccgctctatataccattctgatatgctatttcctcttaaacagtgtagtgtttttttggaagataattttggagtaaaaattgataataaaaatttccaattgtatgcaaaattacaggaagttaatgcgctattatcaaccattgaatatgggaaaccaactgatgagcaattattaaagaaacaggtaataaacttactatgtgaaatagattgggctgcaatgaaaaaaaatgggcagcaaaacaaattggcaatagaaaactggctaaagaataaaaacaataaaagtgattttaaaactgccaaacagcaaataggtttaattagaggtactcttaaaaataaaataacggaatactataatattactcaagaatacaaagatatagccatgcaagcagggcgtatctttgctaaaatgcgagataaaataacaggggcagctgagcttaataaagtatcacactacgcaatgataattgaagatagtaatgcagacaaatatgtcttgttacaagagtttacagaaaaaaaagatgatagaatatatgcaaaaacggaatataataatagagatattgttacctattccgttaattctgttacttcaggagctattgctaaaatgttaagaaagaaaagattagagagtttaaatgataaatatggtgaaagcacgtttcagcagcaggaacttactaaagaacaaaaggaacagcaatatattaaggagtggaaagattttattgaagaaaagcgttgggatttggaatttaaattaaaaattaaaggaaaagattttgagcaacttaaaaaagaaatagactctaaatgttatgagctaaacaaaaaatatattaatagagaaaaacttgttgatttaattaataataaaggttgtttgctgttcccaattataaatcaagatttagcaaaaaaagaaaaatctgagacaaatcaatttactaaagattggaatgcggtgtttgcgcaaaatactccttggcggttaacacccgaatttagaatatcgtatagaaaaccaactactaattatccggagtctgatataggtgataagcgttattctcgttttcaaatgattgggcatttcctttgcgattacattcctaaaaatgataattatatatcaacaagagaacaaattgccatctataaagatgataaacaacaagaaactgccgtaagtagatttcatgataaattaaaggctagaactgaagcggaagagcataatgactctattaacgccctaattgcaaaatttggaaacgtaaataaaaataaaaaatctattatagcagataaacctaaagaagaattttatgtatttggcattgatcgtggacaaaaagagcttgcaacgttatgcgtaatagaccataataaaaagattataggagattttgatatttatgtccgttcttttaattccatatcaaaacactgggagcataaatttttagagaaacgtcatatcttggatttatctaatttaagggtggaaacaacactgtttattgatggaaaacccgaaaaaagaaaagttttggtggatttgagtgaggtaaaagtaaaagataaaaaaggaaattttacaaatcctgataaaatgcagattaagatgcaacaactcgcttatatccgaaagttgcaatttcagatgcagacgaatcccgaagtggtacttgcttggtatgaaaaaaactcaacaagagagttgatgttgaaaaattttgtaaagaaatcagacgatgacaataatggtcttgtctctttttatggagctgctgttgaaaaattggaaaatactttaccaatagaaaggataagtgaaatgcttcaaaaatttgacttattgaaaaaaaaggaaaaagagggagaagatgtaaaattacagatagaccaattggtgcaattgg

SEQ ID NO: 230 - DNA, 3255 bp, Smithella sp.
  misc_feature: Smp3Mmc3 effector gene
atggaaaaatacaaaattactaaaaccattcgtttcaaattgctgcctgataaaattcaagacataagccgtcaagttgctgttctgcaaaattctacaaacgcagagaagaaaaacaatcttttgagattaatccaaagggggcaggaattaccgaaactattgaatgaatacatccgatacagtgataatcataagctgaaatcaaatgtcactgttcattttagatggttgcgtttgtttacaaaagatttgttttacaattggaagaaagacaatacggaaaagaaaatcaaaatcagcgatgttgattatttgtctcgtgtgtttgaagatttttttaatgaatgggaaacagtaattgaaagaataaatactgattgcaacaggccggaggagtctaagacaagagacgcggaaatcgctttctcaataaaaaaaattgcaaccaagcagatgtttccattcataaaaagttttgtttataatagtaattacaaaaacagcgaagaaacaaaaagcaaactaaccgctttgctaaatgaatttgaaacagtattgaaaatatgcgagcagaactatctgccatctcaatccgcgggcattgtgattgccaaagcgagtttcaactactataccatcaataaaaaacagaaagattacaaaggatacactgatgatattgaaaaaatagagaaaggaatgaattcaaaatttcattatgaaagaaaatatgaccagttgcttgaagaattaaaccttatcgctttaaaagaattaccattaatcgaattttattcgaaaatcaaaagctataaatcaaccagaaaaatcgagttttcagaagctgtttccaaagggttggcgtttgccgatttaaaaagcaagtttcctctgtttcaaactgaatcaaataaatatgctgagtttttagaactgaccggcaggataacgcaaataagtaccgcaaaaagtttgctttcaaaagataatcccgaagctcaaaaacttcgagacgaaattaagaaattaagaataaacaggggtgaatattttaaaaacaattttcataaatatattagcctttgcaatttatataaaaaaatagctgacaaaaaaggcagattaaaaggccaagtcaaggggatagagaacgaaaggattgattcgcaaagaatacagcactgggcgttggtgctggaggacaatttaaaacattctctgattctaataccgaaagagaaagtaactgaggtttacagaaaagtccgggcttcaaaggccgatagtacaagttcaagttcgtcattgtactactttgaatccatgacctatcgcgcattacacaaattgtgttttggtgtaaacggcaatacttttttgccggaaatccagaaagaactgcctgaatataacccaaacaaacaaagtgactttggtgaattctgtttccataaaagcaatactgataaagaaattgatgaacctaaactaatatccttttatcagtctgttttgaaaactaattatgtcaaagacaatctgaacctgcctcaaagtgtatttgatgaagcaaccgtccagacatttgaaacaaggcaggactttcagatagctttagagaaatgctgttatgcaaagaagactatcatttccgaaactttgaaaaaagaaatattagaagacaacaatgtgcaaatatttcaaatcacaagtcttgatttacagaggtcagaacaaaagaacctgaaagcacacacaaagatttggaacagattctggacgaaacaaaatgaaacggctaattatgatctgcgtctgaatcctgaaaccgccattgtctggcgaaaacctaaaaagacaagaatagataaatatggagcaggaacatcattatatgatccgaaaaagcggaacagatacttgcatgagcaatatactctttgtaccacggttacagacaatgctttgaataatgaaattacttttgcctttgaggatacaaagaagaaaggcactgaaatagttaagtataacgaaaaaattaatcagacattaaaaaaagaattcaataaaaatcagttgtggttttacggcattgatgctggcgaaattgaattagcaacgttggccttaatgaataaagacaaagaaccgcaattgtttacagtttacgaacttaaaaaatcggacttcttcaagcatggatacatttataacaaagagcgtgaattggtgatacgcgaaaagccgtataaagcgattcaaaatctatcctattttttaaatgaagagctttatgaaaagacattcagagatggtaagtttcaagaaaccttcaatgaactgtttaaagaaaaacatgtatccgcgatagatttaacgacggcaaaagtgataaatgggaaaatcattttaaatggcgacatgatcacttttttgaatttgaggatattgcacgctaagcggaaaatatatgaggaactgataataaatccgcaagctgaattaaaagaaaacgaaaaagaatattatctgtattttgataaagagggaacagaaaaagttgaaaagatttatcgaagcagattggattttgaacatattaaaccctatcaggaaattagaaatgacctgaatgcctattttaaaaatgttcaaaaaaatgaagcaaaagtggaagatcaaataaatcaaacacgaagagcgcttgtcggaaatatgataggcgtgatttattacttgtatcaaaaatatcggggcattatttctattgaagatttaaaacaaaccaaagttgaatcggacagaaataaatttgagggcaacatcgaacggcctttggaatgggcattgtaccgaaaatttcagcaagagggatatgtgccgccaattagcgaacttattaaattaagagaacttgaaaaatttcctttaaaagatgttaaacagcctaaatatgaaaacatacaacagtttggaattatcaaatttgtaagcccagaagaaacaagtactacttgcccttcttgcgagaaaaaagcttatgaattacaaaaagaaaagaaaggagaagaaaagcccgctgaaaacaaacgatatgaagcggataaaaaggcaggagttttctgctgtccaaaatgcggttttcataacagaaccaatccaatgggatatgaaagtttggatagtaatgataaagttgccgctttcaatattgccaaaagaggatttgaacagaactttcgccaatag

SEQ ID NO: 231 - DNA, 3195 bp, Smithella sp.
  misc_feature: SmpMmc3 effector gene
atggaaaaatacaaaattactaaaaccattcgtttcaaattgctgcctgataaaattcaagacataagccgtcaggttgctgttctgcaaaattctacaaacgcagagaagaaaaacaatcttttaagattagttcaaaggggtcaggaattaccgaaactattgaatgaatacatccgatacagtgataatcataagctgaaatcaaatgtcactgttcattttagatggttgcgtttgtttacaaaagatttgttttacaattggaagaaagacaatacggaaaagaaaatcaaaatcagcgatgttgtttatttgtctcatgtgtttgaggcttttttaaaagaatgggaaagcactattgaaagagtaaatgcggattgcaataaaccggaagagtctaaaacaagggatgcggaaattgctctttcaatcagaaaacttggaatcaaacatcagttgccattcataaaaggttttgttgataatagtaatgataaaaacagcgaggatacgaaaagtaaactaacagcgttgctaagtgaattcgaagcagtgttgaaaatatgcgagcaaaattatttgccctctcaatcttcgggcatcgcgatagccaaagcaagcttcaactattataccatcaataaaaagcaaaaggattttgaagctgagattgttgcgctaaaaaaacaattacacgcaaggtatggtaataaaaaatatgaccagttgcttagagaattaaacctaatccctttaaaagaattaccattaaaagaattaccattaatcgaattttattcggaaatcaaaaaacgtaaatcaactaagaaatcagagtttttagaagctgtttccaacgggttggtctttgatgatttaaaaagtaagtttcctctgttccaaactgaatcaaataaatatgatgaatatttaaaactgtccaacaagataacgcaaaaaagtactgcaaaaagtttgctttcaaaagatagtcccgaagctcaaaaacttcagactgaaattacaaaattaaaaaaaaacagaggcgaatattttaaaaaggcatttgggaaatatgtccaactctgcgagctgtataaagaaatagccggaaagcgcggaaaattaaaaggccaaatcaaggggatagagaacgaaaggattgattcgcaaaggttacagtattgggcgttggtgctggaagataatttaaaacattctttgattttaataccgaaagagaaaacaaatgagctttacagaaaagtctggggggcaaaagatgatggtgcaagttcaagttcaagttcgacattatattattttgaatcaatgacttaccgtgcattgcgcaaattgtgctttggtataaacggcaatacttttttgcctgaaattcaaaaagaattgcctcaatataaccaaaaagaatttggagaattttgttttcataaaagcaacgacgataaagaaattgatgaacctaaattaatatcgttttatcagtctgttttaaaaacggactttgtaaaaaatactttagctttaccgcagagtgtatttaatgaagtagccatccagtcatttgaaacaaggcaggattttcaaatagccctggaaaaatgctgttatgcaaagaagcaaatcatttccgaaagtttaaaaaaagaaatactggaaaattataacactcaaatatttaagatcacaagccttgatttgcaaagatcagaacaaaagaacctgaaaggacacacacggatttggaaccgattctggacaaaacaaaatgaggagattaattacaatttgcgtctgaatcctgaaatagcaattgtctggcgaaaagcaaaaaaaacaagaatagaaaaatatggtgaaagatcggtgttatatgagccggaaaaacggaatagatacttgcatgagcaatatactctttgtaccacggttacagacaatgctttgaataatgaaattacttttgcctttgaggatacaaagaagaaaggcactgaaatagttaagtataacgaaaaaattaatcagacattaaaaaaagaattcaataaaaatcagttgtggttttacggcattgatgcgggcgaaattgaattagcaactttggccttaatgaataaagacaaagaaccgcaattgtttacagtttacgaacttaaaaaattggacttcttcaagcatggatacatttataacaaagagcgtgaattggtaatacgcgaaaaaccgtacaaagcgattcaaaacctatcctattttttaaatgaagagctttatgaaaaaacattcagagatggtaagtttaatgaaacgtacaatgaactgtttaaagaaaaacatgtatccgcgatagatttaacgacggcaaaagtgataaatgggaaaatcattttaaatggcgacatgatcacttttttgaatttgaggatattgcatgcccaacgaaaaatatatgaggaactaatcgaaaatccacacgctgaactaaaagagaaagattacaaactatatttcgaaatagaaggaaaagataaggatatttatataagcagattggattttgaatacattaaaccttaccaagaaattagcaattacctgtttgcctattttgccagtcaacaaataaatgaagcaagagaagaagagcaaattaatcagacaaaaagggcactggcaggcaatatgataggcgtgatttattacttgtatcaaaaatatcggggcattatctctattgaagatttaaaacaaaccaaagttgaatcggacagaaataaatttgagggcaacatcgaacggcctttggaatgggcattgtaccgaaaatttcagcaagagggatatgtgccgccaattagcgaacttattaaattaagagaacttgaaaaatttcctttaaaagatgttaaacagcctaaatatgaaaacatacaacagtttggaattatcaaatttgtaagcccagaagaaacaagtaccacttgtccaaagtgtcttcgaagattcaaagattatgataaaaataagcaagaaggattttgtaaatgccaatgtgggtttgatacaagaaatgaccttaaaggttttgaaggtttaaacgaccccgataaagttgcagctttcaatattgccaaaagaggatttgaagacttgcaaaagtacaaataa

SEQ ID NO: 232 - DNA, 3654 bp, Smithella sp.
  misc_feature: Smp2Mmc3 effector gene
atggaaacaatattataccaacgaacaagatcaatacggtttaaattagaacctattgaagcagaagaaatagaaaaagaaattactgtaatcaaaacccaagacaatgacggcttggtgcaagactgcatattcttggttaataaaggcaatgaacttgcaaataagctaagtaaacttatttgtcgtgattacaactgtgatgaacaaaacaatatctcattaaaacttagaaaagatgtggatgtaaagtatgtttggctgagactttatacaaaaaatgaatattatgattggagtgaacccaataacaaaacaaaaatatattcattagctgaaataccttatttatcagaaaaatttgtgcattggtttgcatcatggaaaagggatttggccatattaaatgaacaaataacaaaaaaaacagaggagcaacacaatttaaacagaagggcagatataggtttgattatacaatcattatccaagcgcaacagttttccctttataaaagagtttatagcagcaatgaatcctaaaaatgcatctaaaatagagatagaagaaatcgtaaaagaaattgatgagctgctgaataagtgcgaaaaaggatttttacccacccaatcatcgggttatccgattgctcgtgcaagtttgaattactatactattttcaagaatccaaaagattttgacaaggaaatattggaattaagcggtgaaaaattctgtaacgacaatcaaaatgaatgcgaaatattgaaagcattttttacgcattgttttgatgtggatgggttttgtggaatgttcttggatgtaaaaaaattagaaaacatctgctcaaagttaaatagcataaagaattatcaagaaaatgataagcaacttatcgcagaagccatagacaataaaattaagctactaaacgaagaaaaagacaatagcaaaaaaaagaaagcaaaaaaaataattgaacaacttgaaaatgataaaaaaatagtgtgcaacttttgggaacttcaggaaaacttttatgttcaagaaagaaattcttccaaaaataataacaataaatactgcctcaataaaaactattttttgatacaacagttatgccaaagcatgaaattattcaaggcaagagaaaaagcaaggtttaacgaagctgtacaaaataataaggacttaccttatggtcagttgaatcagttttttctgttttcagctatacaaatcggtaatgaaaatgacaaaagaaaaactgacaatgaggtgtttgatgattttatgaagcacaataaagagctacatgatatttccgataaaattagcacgcttaaacaaaacaaaaatttggatgaaaaaaataaaaaagaattagataaaatatgtacccagaaagatcaaatagcaaaaagcagaggcaaatattttacagatttagatcataataaaacctatttttccaattatgttaagttctgcaatgtatatagagaagttgctttaaaagctgggcagcttaaagccagaattaaaggcatagaaaaggaaaaaatagaatcccagcgattaaaatattggtcagtaattattgaagagaataaaaagcaatatgtcgcttttattcctaaaagtaatgactatgcaaaaaaagcttatgagaattattcaaaaatatatactaatgataattcaataaacacttgtcagttacattattttgaatcacttacacacagagctttagaaaaactttgtttcagcggtgtacaagaaagaacaaatacctttcaacctgaaataaaaaaggaattatcaatagagaaatttccaaactattacgaaaaaggatatttcattaaaggtgaatattttttcaatgataaaaaaacaggtataaaagatgaatccaaactaatccaattctataaagatgtactaaatacgcaatatgccaaatcagcgcttaaaggcatcccgtgggagcaattaaaaaaaactgttttagatattcagttcgaaaattttgatggattccgccaagctcttgaaaagttcagctatgtaaagcatattaaaacaaagaaagatttattgaatgaattatcaaaagaatatgatgctcaaatatttgaaattacctctttagatttaaaacggcaaatcaaagaggacgcaaatcttaaagaacacacaaaaatatggatggaattttggagcgaaaacaaccaaagtaataattacttgatcagaataaatccgcaattaaccatcacttggcgtgatagcaaagaaagcagagagaaaaaatatggagaagaaacttctttatatgatgtgaataaaaataaccgatttctaaaaccgcaatatacaatttcctttaccattaccgaaaacgccacaacacaaacaatgaacacagcatttaaagatgcgcaaactaaaaaagatcagattcatgagtttaataaacaattattccaatcatatcaacctcaatatttttttggaatagacgtaggaaatatagaattggccaccctgtgtattattaatcctgaaaaagatttgaatgaagaaaagatgtcaaaagaatctttacaatattttgatgtttataagttgaaaaaagaccaatataatttctctaagccctatcacttcaagacgaggaatgaaaccagggaaagaaaagcaatagataatctttcttattttgcaatcgaagaaaattacaaacaaacattcaatgacgataattttgaagcgtgtttttctgatttatttgaaaaaccggttaacacttgtgccattgatcttacaacggcaaaggttttaggtgataagatatttctcaatggcgatatcaaaacttatctttcgttaaaagaacgaaacgcaagaaggaaaatttgtcaaatcattgaaaaacatccgaacgctaaacttctgattaatggaaataaaattttctttcaggaaagtacatcatgtgaaagaacctgcctttgccaagaacctatttattattttaatgataaatatgatagagaagtacaaactttggcagatataaataatagacttgaagattatattaaagataaagataaatccgagctgatagaagagagtaaaataaatcacctcagagccgccattgctgcaaatatgactggcgttatctatcatctttttgaaaaataccagagcttaattgttttggaatatttaacgatttcagatatagcaagtcataaaaaaggcttaaaagcttttgaaggaaacataacacgtccattacaaattgcattatttcgtaaatttttaaaaagcagtcttgttccacctgcattgagtgaaattattcaattgagagaaaaagcaaaggatagaataacaaaaatagggataataaattttattgataaaactgctactagcgtttcttgtccaaattgtcttggtaaatttgaaaattataatgataataagagaaaaggattttgtttatgtcctgattgtggttttgatacaagaactgaccttaaaggatttgaaggcttagacggccccgacaaagttgccgctttcaatattgccaaaagaggatttgaagacttgcaaaagcacaaataa

SEQ ID NO: 233 - DNA, 3174 bp, Candidatus Roizmanbacteria
  misc_feature: CrpMmc3 effector gene
atggaaatacaagagttaaagaatttatacgaagtgaaaaaaacggtgaggtttgagttaaagccgagtaagaagaaaatttttgagggtggtgatgttatcaaattgcagaaggattttgaaaaagtacaaaaattctttttggatatttttgtttacaaaaatgagcacacaaagctagaatttaagaaaaaacgagaaatcaaatatacatggctaagaactaatacgaaaaatgaattttataattggagaggaaaaagtgatacaggaaaaaattatgctttaaacaagataggcttcttggcagaagaaattctgcgatggcttaatgagtggcaagaactaacaaaaagtttaaaagacctaacacaaagagaagaacataagcaagaaagaaaaagcgacattgcttttgttttacgaaattttttaaagagacaaaaccttccttttataaaagatttttttaatgctgttattgatattcaaggcaaacaaggaaaagaaagtgacgataaaattagaaaatttagggaagaaataaaagaaatagaaaaaaatctcaacgcttgctccagagaatatctcccgactcagagtaatggagtgcttttgtataaggcaagtttcagctattataccctgaacaaaactccaaaagagtatgaagatttaaaaaaagaaaaagaatcagaattaagcagtgttttacttaaagaaatttatcgaagaaaaaggtttaacaggacaacaaatcagaaagacaccttatttgaatgcacttccgattggttagtaaaaattaaacttggtaaggatatttatgaatggactttagatgaagcctatcaaaaaatgaagatttggaaggcaaatcagaaatcaaattttatagaggcagttgcgggagataagcttacacaccaaaactttagaaaacagttcccgctatttgatgcttctgatgaagattttgaaactttctatcgacttacgaaagcacttgataaaaacccagaaaatgcaaagaaaatagcgcaaaaacgaggaaagttttttaatgctccaaacgaaacagttcaaaccaaaaattatcacgagctttgcgaactctacaagcgcattgctgtaaaacgaggaaagataattgcagaaataaaaggaatagaaaatgaagaggttcagtcccaactcttgactcactgggctgtaattgcagaagaaagagacaaaaaatttattgtattgattccaaggaaaaatgggggaaaactagaaaatcacaaaaatgctcacgcattcttacaagaaaaagatagaaaagaacccaacgatataaaagtttatcattttaaatctcttactttgcggtctttggaaaaactttgctttaaagaagctaaaaacacatttgctccagaaattaagaaagaaacaaaccctaaaatctggtttcctacatataaacaggagtggaatagcacgccagaaagacttatcaaattttacaaacaagttttacaatctaattatgcacaaacatatttagatttggtagattttggaaatctaaatacctttttggagactcatttcacgactttagaagaatttgagtcagaccttgaaaagacatgctatacaaaagtgccagtttactttgctaaaaaagaactcgaaacatttgcagatgaatttgaagcagaagtttttgaaataaccactcgtagtatctcgactgaaagcaagagaaaagaaaatgctcatgcagaaatttggagagatttctggagcagagaaaacgaagaagaaaatcatatcactcgtctcaatccagaggtgagtgttttgtacagagatgaaatcaaagaaaagagtaatacttcaaggaaaaataggaaatcaaatgcaaataataggttttctgaccctcgttttacacttgcaacaaccatcacgctcaatgctgataagaaaaagtcaaaccttgcttttaaaacagtggaggacataaacattcatattgataattttaacaaaaaatttagcaaaaatttttctggcgaatgggtttatggaattgatagagggctaaaagagcttgcgaccttaaatgttgtaaagttttctgatgtaaaaaatgtatttggagtctcgcaaccaaaagaatttgccaaaattcctatttacaaattaagagatgaaaaagcaatcctcaaagacgagaatgggctgagcttgaaaaatgcaaaaggagaagctcgaaaggtcatcgacaatatctcagatgttttagaagaaggaaaagagcccgattcaacactttttgaaaagcgagaagtttcatctatagacctcactcgagcaaagctaataaaggggcatattatttccaatggtgatcaaaaaacatacctcaaattgaaagaaacatcggctaaaagaagaatttttgagcttttttcaaccgctaagattgataaaagttctcagtttcatgtaaggaaaacgattgagctgagtggaacaaaaatatattggctttgtgagtggcagaggcaagattcctggagaactgaaaaagtaagcttaaggaatactctgaaaggatatttacaaaatttggatctaaaaaatcgttttgagaacatagaaacaatagaaaaaataaatcacttgcgagatgcaattaccgcaaatatggtagggattttgtctcacctgcaaaataaattagaaatgcagggagttatagcattggagaatctggatacagtgcgggaacagagcaataaaaaaatgatagatgagcattttgaacaaagtaatgaacatgtctctcgtcgcttggagtgggctctgtattgtaagtttgcaaatacgggagaggtgccaccacagataaaagaatctatcttcttgcgagatgaatttaaggtctgtcaaataggaattttgaattttatagacgtaaaaggcacaagttcaaattgtccgaattgtgatcaggaatcaagaaaaactggtagtcattttatctgcaactttcaaaataattgcatttttagttcaaaagaaaatcgaaacttacttgaacaaaaccttcataattctgatgatgttgccgccttcaacatcgccaaaagggggttggaaatagttaaggtttga

SEQ ID NO: 234 - DNA, 3204 bp, Omnitrophica WOR_2 bacterium
  misc_feature: ObpMmc3 effector gene
atgaagaatggtataaatttattcaagacaaaaactacaaaaactaaaggtgttgatatggaaaaatatcagataacaaaaacaattcggtttaaattattgcctgataatgcgcatgaaatagtggaaaaagtaaaaagcttaaaaacatcaaatgttgatgagttaatggatgaggtgaaaaatgttcatttgaaaggtttggagcttttatttgcattgaaaaagtatttctattttgatggcaaccaatgcaaatcgtttaaatcaactttagaaataaaagcacgttggttgcgattgtatactccggatcaatattatttgaaaaaatcatctaaaaatagttatcagcttaaatcgttgagctactttaaagatgtttttaatgattggttattcaattgggaggaatctgtttcagagttagcaataatttatgaaaagtataaaatttgtcaacaccaaagagattctcgtgcagatatcgctttgttaataaagaagctttcaatgaaagagtactttccgtttatttctgatttgattgattgtgtgaatgataagaattcaaataaaacatttttgatgaaattaagtgaagaattgtcagttttacttgagaaatgtaatagtagagctttgccttatcagtcgaatggtatcgttgtcgggaaagccagcttaaattattacacagtctcaaagtccgaaaaaatgcttcaaaacgaatatgaggatgtctgtcaaagtttagataaaaattatgatattacggagatgaaagtaatattatataaagaaaaattggacaatttaaactttaaggatgtaacaattgcaaatgcttataatttactgaaagaaaataaggcattacaaaaacgattgttttctgaatatgtttctcaaggaaaagtgttgagtttgataaaaactgaattgccgttatttagcaatattaatgataatgattttgaaaaatataaagaatggtctaatgaaataaaaaaattggctgataagaagaatacattttgcaaaaagactcagcaagacaaaataaaagatattcaaaacaagataagtgaattgaaaaagaaaagaggagcgctctttcagtataaatttacaagttttcaaaagcattgtgataattacaaaaaagtggctgttcaatatggaaaattaaaagccagaaaaaaagcgattgagaaagatgaaattgaggcgaatttattgcgatattggtcggtgatattggagcaagaagacaaacattctttagttcttattcctaaaaataatgcgaaagatgctaaacaatatattgaaacaattaataccaagggaggaaagtatattatccatcatttagattctctgacattacgagctttgaataagttgtgttttaacgcggtcgatatagagaaaggtcaaatggtaagagaaaacacattttatcaagggataaaagaagagtttgagcgtaataaaataaattgtgataatcaaggtgttttgaaaattcaaggtttatatagctttaaaactgaaggaggacaaatcaatgaaaaggaagctgtcgaattttttaaagaagttttaaaaagtaattatgctcgggaagtattaaatcttccgtatgatttggaaagtaatatttttcaaaaagaatatacgaatcttgatcaattccgacaagaccttgaaaaatgttgttatgctttacattcgaaaattgggaaagatgaccttgatgagtttactagaaggtttgaagcgcaagtgtttgacattacgagtattgatcttaaatccaaaaaagaaaaaacaaaaactactggagaaatgaaaaaacatactcagctttggttggagttttggaaaggagctattgaacaaaatttcgcaactcgtgttaatccggaactatctattttctggcgtgcgccgaaatctagcagagaaaaaaagtatggtaaaggttcggatttatacgatccaaataaaaacaatcggtatctttatgaacaatatactcttgcgttaacaataactgaaaatgctggatctcattttaaagatattgcttttaaagacacttcaaagattaaagaagctattaaagaatttaatatgtctttatctcagtctaaatattgtttcggaattgatcgaggaaatgcggaattggtttcgttgtgcttgataaaaaacgaaaaagattttccttttgaaaagtttcccgtttatcgtttgagagatttgacgtatcaaggcgactttaaggataaacatgaccaaatgcgatatggtgtagctatcaaaaatatttcgtattttatagatcaagaagatttatttgaaaaaaataatctttctgcaatcgatatgacaacggcaaaattgataaaaaataaaattgttttaaatggggatgttttaacttatttaaaattaaaagaagaaactgccaaacataaactgactcaattctttcaaggtagttcaatcaataaaaattccagagtctattttgatgaagatgaaaacgtttttaaaatcacaactaatcgcaatcataatcccgaagaaataatctatttttatagaggggaatatggagcaataaaaaataaaaatgatttggaagatattttaaatgaatatctttgcaaaatggaaactggtgaatctgaaatagttcttttaaatagagtgaatcatttaagagatgcgataagcgcaaatattgttggtattttatcgtatttaattgatctatttcctgaaactattgttgcattggagaatttggctaaagggacgattgatcgacatgtcagtcaaagctatgaaaatattactcgtcgttttgagtgggcgctatatcgaaaattgctgaacaaacagcttgcaccacctgaattgaaagaaaatattcttttaagggagggagatgacaaaatcgatcagtttggaattattcattttgttgaagaaaaaaatactagcaaagattgtcctaattgtcgaaaaactacccaacaaacaaatgataataagtttaaagaaaagaaatttgtttgtaaatcttgtggatttgatacatcaaaagatcgaaaaggaatggattctttgaattctccagatacggttgcagcgtataacgttgctcgtaaaaaatttgaatcataa

SEQ ID NO: 235 - DNA, 3699 bp, Sulfuricurvum sp.
  misc_feature: SfpMmc3 effector
atgttacatgccttcaccaaccagtaccaactctcaaagaccttgcgtttcggagccacattaaaagaggatgaaaaaaaatgcaaatcccatgaagagctgaaagggtttgttgatatatcgtatgaaaatatgaaaagtagcgcaacaatagccgaaagcctaaatgaaaatgagttagtcaaaaaatgtgagcgatgttatagcgagattgtaaagtttcataatgcttgggaaaagatctattatcgaacagaccaaattgcagtatacaaagatttttatcgtcaactaagtagaaaagcgagatttgatgcaggcaaacaaaatagtcagctgattacccttgcatcattgtgtggtatgtatcaaggtgcaaaattatcacgctatattacaaattactggaaagataatattactcgtcagaagagttttttaaaggattttagccaacagctccatcagtacacaagagctcttgaaaagagtgacaaagcacatacaaaaccaaatcttatcaattttaataaaacattcatggtacttgcaaatcttgtaaatgagattgttattccactatccaacggagctatttcatttcccaacatcagtaaacttgaggatggggaggagagccatttaatagagtttgcacttaatgattacagtcaactcagtgaattgataggtgagctaaaagatgctattgctacaaacggagggtacacaccatttgcaaaggtcacactcaatcactataccgcagagcaaaaaccgcatgttttcaaaaatgatattgatgcaaaaataagagaattaaaacttatagggttggtggaaacattaaaaggtaaatcttctgagcaaattgaggaatatttttccaatcttgataagttcagcacctataatgatagaaaccaatcggtcatagtgagaacacaatgctttaaatacaaaccgataccttttttggtcaaacaccaattagcaaagtatatttcagagccaaatggttgggatgaagacgctgttgcaaaggtgttggatgccgttggcgcaataagaagtcctgcacatgattatgcgaacaatcaagagggatttgatttaaaccattacccaataaaagttgcatttgattatgcttgggaacagttggcaaatagtctttatactactgtcacttttcctcaagagatgtgcgaaaagtatcttaattctatctatgggtgcgaagtgagtaaagagcctgtttttaaattttatgcggatttgctttatattagaaaaaatctagccgtgcttgagcataaaaacaatttgccgagtaaccaagaagagttcatttgcaagataaataatacatttgaaaatatagtattgccatataaaatttcgcaatttgagacttataagaaggatattttggcatggataaatgacggtcatgaccataaaaaatatactgatgccaaacaacagttaggttttattcgaggtggcttaaaagggcgaattaaagcagaagaagtgtctcaaaaagataaatatgggaaaatcaaaagctactacgaaaacccatatacaaaactaaccaatgagtttaagcaaatatcttcaacttatggcaagacatttgcagagttacgagacaaatttaaagagaaaaatgagataaccaagattacccattttggtatcatcatagaggataaaaatagagatagatatcttcttgcaagtgaattgaaacacgaacaaataaatcatgtctcaactatactcaacaaactagataaatcatcagaatttatcacctatcaagtcaaatctttaacctctaaaacattgattaaacttatcaaaaaccatactacaaaaaaaggtgccatatcaccctatgcagattttcatacttcaaaaacaggatttaataagaatgagattgaaaaaaattgggacaattataaaagagagcaagtattagtggaatatgtcaaagattgtcttaccgactctacaatggcaaaaaaccaaaactgggcagagtttggatggaattttgagaagtgtaacagttatgaagatatcgagcatgagattgaccaaaaatcgtatctactccaaagcgatactatctcaaagcaatcgatagcatctcttgtagagggtgggtgtttattgttgcctatcataaatcaagatattacttcaaaagagcgaaaggataaaaaccagtttagtaaagattggaaccatatttttgaaggctcaaaagagtttagactacatccagagtttgcggtctcttacagaacacctatagaggggtatccagtacaaaaacggtatggaagattacaattcgtatgcgcctttaacgctcatatagtccctcaaaacggggaatttatcaatctcaaaaaacagatagagaattttaatgatgaagatgtccaaaagagaaatgttactgaatttaataaaaaagtaaatcatgctctatcggacaaagagtatgtagttatcgggatagatagaggcttgaagcaactagccacgctgtgcgtccttgataaaagaggcaaaattttaggcgactttgagatttacaaaaaagagtttgtccgagcagaaaagagaagcgagagtcattgggaacatactcaagcagaaactagacatattcttgacctatccaatttacgagttgagacaactatcgagggaaagaaagtattagttgaccaaagcctcacgcttgtgaaaaaaaacagagacacccctgatgaagaggcaacagaggagaacaaacaaaaaatcaaactcaaacagttgtcatatataagaaagctccaacataaaatgcaaaccaatgaacaagatgttttggatttaatcaacaatgagcctagtgatgaagagtttaaaaagagaattgaggggcttatctcttcctttggagaggggcaaaagtatgcagatttgccaattaataccatgagagagatgataagcgatttacaaggtgtgatagctagaggcaataatcaaacagagaaaaataagattatcgaacttgatgctgccgataatctcaagcagggtatcgtagccaatatgattggcatagtgaattatatttttgctaaatacagttataaagcgtatatttcgctagaagatttaagtagagcctatggcggtgcaaaaagtgggtatgatggacggtatctgccatcgactagccaagatgaagatgttgattttaaagaacagcaaaaccagatgttagcagggttgggaacctatcagttttttgagatgcaactactcaaaaaactacaaaaaatacagagtgataatactgttttgcgttttgtcccagcctttagaagtgcggataactatagaaatattttgagattagaggagacgaaatataagagcaaaccatttggagtagtccattttattgatccaaaatttacatcaaaaaaatgtccagtatgcagtaagacaaatgtatacagagacaaagatgatatccttgtatgtaaagagtgtggttttaggtcagattctcaacttaaagagcgtgagaataatattcactatatccacaatggagatgataatggggcgtatcatatcgctttaaaaagtgtagaaaatctaattcaaatgaaataa

SEQ ID NO: 236 - DNA, 3534 bp, Unknown
  Unknown bacterial species
  misc_feature: No2Mmc3 effector gene
atgttaacaaaattaggagatttatttatgaaacagattaaaacaaccaaagctatcagattcaaattggaaaacgatgataaaaacactatcattaacaatagcataacaaaccttaactctcgcaggaatttcgacttgaatctttttgtcgatgacttggacacttttataactgattgtaacgattacctcttctgttttaaaaagaaaggctgcagagaaatattctatgtcaatccaaacttgattgtcaaaaacgaatggcttaaaaaatacgccaaacaggacttcgccaaactaaaacagaatcataccgctcaaagaatccaatataaaataggtgatatagacggcttgaatctaaggatacaagatcttatcgatgatatagatgatatttatactaaactttgtgatgatgcttccgcagaacttcacgagagagcaaaacgcgctcatactgctctgctgctgaaacgactgtctgccaataattctttaccttgcttggtttcattgataaacaatattgtagataaaaatgaaaaagataaccttagcctgaaactgaagtcttccggcaagaaattgctctctcagttggaaataggattacaggaatatctgccggaacaatcgtctggcgtagctatcgctaaagcaagtttcaactattataccatcaacaaaaaacctatcgactacgacagaaagatagaggaattgtcgcaaaatatgagtacctcattggatgaatggaaaaaaaaatggcagtttaacaaaggattatgggaactgattgaaattaaatcggagggcaagaccctctatctcggcgattctcctttctccgatgatggcgagtatgcaagccttagactgattctcaaaaatatccttgcagaacagaaagcgagattctcggagatgatgcaggataatgtatcatacgaagagcttaaagacagcgatttgttcttgtttaacaatatatcggaagatgaatatgacgaatatcttgatttgacaaatcaaattgaagaactcgctaccgaaatcaatcaggaagacgatgagtgtaaaaagaaagatcttcgtagtgatttgatgaaattgaagaaagaaagaggttcccttataaatgctgcagacaaaaaaactaaagatagattcaaaacatataaaacctttgccgatttttacagaaaggtttctcaaaaacacggcagagttctcgccaagttgaaaggcatagaaaaagaaagaacagaatcacagcttctgcaatattgggctttgatattggaagtcaataatcagcataaattggttctcattccaaaagaaaaggctcaagaatttaagtcgcgattgacaaaatctaatgataaaaaatcaacgataaaactttattggtttgaaagtttcacgttcagaagcctgcagaaactctgcttcggaaatatagaaaacggcagcaacacattctatcccagaataaagaaagaacttcaatataaatattccaccacagacagaaacggctatcctcaattcattgccggagaattcgagtttaaaggcgacgaacagaaaaagatacaattctataaggatgtgttgaatactaaatatgcgcaatcggcattgagtttccctgttaatgaagttaaacgtaacataattgataaggatttcgagaccttggacgatttcataatcgctctcgaacagatttgttatcagcgttatgtaagcgtcaatcctcatctgataaatgcgctttcagaaaatttcaacgctcaaatactcgacatcacttcccttgatttgcgtaatgaatcgaatgtgaaagataaagatgtggcttattctcacgatgataaaatccatacaaaaatatggagacaattctggtcggttgataacgaaaagaatggctttgatgtgagattgaatcctgaaatcacaatcacctaccgcaaacctaaggaaagtcgtgtgataaaatatggaaatgacagcgagctttatgatgctaacaagaaaaatcgttatctgcatgatcaactgactcttgtgactacgatttcggaacatagcaattctcctgcaaaaaatctctccttcacgacagagtctgaattgaaggatatgattgaaagatttaattccgaaatcaagaaagaaaagataaaattcgctttcggaatcgacaatggtgaagtggaactttctactctcggagtctatcttcctgactttaaacaagattctaacgaagctacctttgcagaattgaaaaaagttgataaatatggatttaaggtcttggaaataaagaatctcctttattctgagaaagattataatggcaaggaaagaaagattattcagaatccttcatatttcttgaataaggaattatattgcagaacttttaataagactgagtctgaatatgaaaagatgtttgaaaatgtttttgaagaaaaacatttgcttactcttgacctgagtactgctaaagtcatcaacggtcatatcgttacaaatggcgatgtggtttccttgttcaacttatggatgcgtcatgcgcaacgtaacatctacgaacttaacgaccatgctgataaggagacttcaaaagaacttattctgaagaaaagcgaagatctgaatcaatgtgaaagaagaaaacttattgattatcttaataagaataataataagtacgatgatttgtctgaaaacgagaagtcagactatatagaatgggtttataaaatatggaatggtgagcattctgaatacggaaaaaacaaaagatttgccgacatcagcaaaggtcaaagggtaggagactacctgaataatgttctcatggctgtggttcacgagaaaggacagatagaaagcgttatcgacatattcgatatcagacatgtgtttaaattcagaaaagatttctattctttgaagtcggaaaaggaaatgctggacgctatcaatagatataatgttaaaaacatttccgatgaagaattggatttgaaatataatgacataaagaaagcattagtggctaatgtcgtaggtgtcgtcgattttctctataaacaatacaagtctcgttttggtggcgaaggcattgtcgtcaaggaaggttttgacagcagcaaggttgaaagtgatagagaaaaattctcaggaaacatatatagatttttggaaaggaaactctatcagaaattccagaactacggacttgttccgccgattaagaatctcatgcttataagagatgctagactgaatcatgcaaacgattttatgcgtttgggaaatatatgtttcgtcggatttgaaggcacaagccagaattgcccagtatgtgagaagggaaggttaagacatggtgaaacctgctctaacaattgcggttttgaaagtaaaggcataatgcattctaacgacggcatcgccggatataatatcgcaaagagaggttttaataatttcaacgaataa

SEQ ID NO: 237 - DNA, 3873 bp, Sulfuricurvum sp.
  misc_feature: Sv2Mmc3 effector gene
atgaaaaaaaatgaaaacaaataccagttatcaaaaacattacgttttggactaacactaaaagagaagatatcgaataatgagaaaacaccttaccaaagccattctcaattcagagatttaattatcctttcagaaaacagaatcagagaaggtatcagcactccacaaaaccgtgacttaccctcttttatccacagaattcaaaattgtaccgattttatcaatgatttcatccatgattggtggatgattctgatgcacacaggacaaattgaattggacaaagactactataaaagcctaactaaaaaagtgggatttgtaggtttctggtacaaagagaacaaaaaaaagggtggaaaaacgaagcaaccacaagccagaaacataccaatgggtgagcttagacatctttgtccccaaaatactaaggagtgtgccacatacatcaccgattattggaaagatcttttgataacagcagccaacaaactgcatgaaagcagtgaacaacaaaagaaattcatcaaagcgatggagcagaatcgcacggataacaaacctaacgaaatagatctgaaaaaatcttttttgagtctggtatctgtgacaatggaactgctaaaccctattctaaacgggcagatactattcaacaaaatggacaggctcgatatgtctaaaaaaagcgacaatgatttcattgatttcgtcaatgatcacgaaacggttcgtgaattaaacaatgacattgaagaaataatcgctgatttcaaagaaaacggcaataatgtaaactattgcaaagcgacacttaatcaagacacagcattaaagcaacacaacaacaatattccaaatgatatagcaactgatttggaagagctaatgatagacagcatcgtcggaaattatgatgatgtcaactcttttatggataactgtgtttctaatttatccgcaaaagagaaaataagaataatcaaagactccaatataagccttatttatcgcgctattctcttcaaatacaagatgattccggcaaacgtaagaagagatatagcccaaggaatggccaaaaagctcaataaagacgaagagaatatctacagttttctatgcgagtttggcactttgcgtactccacaaaaagactacgctgatctgaaggacaaggacagtttcaatcttgacaactatccattgaaagtggcgtttgatttcgcatgggagggattagcaaaagcccagcatcacgaccaatctgattttccttttgatctgtgtcgtaattttctacaagaaaattttgatgtgaacttagaggaaaaccaagattttcttctgtatgcagatcttattgagttaaacgccttattatcaactctcgacaaagggaatcctgcagaccccgactcaataaaagagaaagtattggacatggtcgaacacataaaatggaattctctacttaacccacaaaaggtaaacgaatacaaaaaaaaggtaacctactacaaaaatataatcaaaaaccgtctgaacttttcgaagggcaacgaaacgtacgagagaataaaaaaagagattgccatgagtcgtggaagtcttaagaacaaaatagaaaaatatgacgatctcacttctcaatacaagagtattgccatagatttaggaaagaaattcgcctctttacgagacaaaattataggtgcgaatgaggataacaaggtgactcactatgcaatgattcttgaggattccaattgcgacaaatatctcttgttgcaaaaagtaagcaataacgaagatgacatttatcattatatgagttacgattcttcagatcccaaaacttactatgtcgactctgtcacatcttctgcaatagcaaagatgatcagaaaggaaacgtatcaatccaagaaaaatcaatccaagataaaagagtatgctaaattagaagagaaagaaagagagagacggtacgttgaagattggtgcagattcatacgcagaaaaaaatacgacaataggtataatttgaatattaacaatggtttatcttttgaggcactgaagaaagagatcgattccaagagttatattttggtgaaaaagaacattagtgttgattctatccgtgaacttgttgaaaatgaaggatgccttcttttccctatcgtcaataaagacctcacaaaggaaaggaaaacagaagacaatcaattcacaaaagattggaatatgatattctctgggtctgaaaccaattggagattaacccctgaattcagagtgacgtatagaaatccagtaccaggatatcctaatgacaaatttgggtcgaaaagatattcaagattccagatgaacgctcattttgtatgcgattttattccatcctctaattcatacacatccaacagagaacaaatcgccatattcaaagacgaaaatgaacagaaaaagagagtagaggaatttaatcgcaccctatcaaacatcaatcaaaaattctatgtcattggtattgatagagggcaaaaagagcttgccacactttgtgtcgtcgaccaggataagaaaatacacggagattttaagatctactctcgcaaattcaattccgaaagaaagcaatgggagcattattctctcgaaggagaaaaagggacaagaaacatccttgatttatctaacctccgtgttgagacaaccattatgattgatggcaaaccagaaaggagacaagtacttgtcgatctgagtgaggtgttggtgaaggataaagatggaaattacacgaagcccaacaagatgcagatcaaaatgcaacaaatggcttatgtgcgaaaacttcagttccaaatgcaggcaaatccaaccgaggttttggaatggtatgagcagaatccaacagaagagctgatcataaagaatctcgtcgacaaagagaacggagaaaagggacttatctctttctacggagcagcacttgtagaactagaccagacacttcccgtctcaaaaataaaagagatgctcgaggaatttaagatactgaagcaaagagaaagcaaaaaggagaatgtgcaaaaagagctgaatagtcttacacaacttgaagctgtcgacagtctgaaagcaggaattgtcgcaaacatggttggcgtgatctcatatatcttaaagacactggattataatgcctatatctcactcgaagatttgtctaaagcgcaatcaagccccgaatttgcaagtggaatatcaggagcaatcaccaaaatgtcgagagaagaaggaagaagaatagatgtggagaaatatgccggtcttggattgtataatttcttcgagatgcaattgctacgaaaactacaccgcatacaaacagatagcggaaacattctccatcttgtcccagctttccgtgcccaaaagaattacgaccacatcatggtaggaaaagaaaaaataaagaaccaatttggaatcgtgttctttgtagacgcggcagctacatctatcaaatgtccacgctgtggtgctgtcaataaggaggatttccatccaaataaacaaaagtacccagatgcagaaaaagggccaaaattgagaaatggcaaggagcagtcaggccaaaaaggggtatgggtaaccagagacaaggaagacgacgaccgtatcaaatgctattgctgtggattcgacacaaaggaaaagaacgaaggaaatccttttatgtatatcaagagtggcgacgacaatgcagcctatcttatatcagatttaggagttgagtcttacagaaaagcttatgaattagctgcgactgtagtggaagacagaaaaaaacattaa

SEQ ID NO: 238 - DNA, 1344 bp, Unknown
  Unknown bacterial species
  misc_feature: Bd2Mmc3 effector gene
atgaaatatcaattaacaaaaacacttagattcggacttacaaaggtaaggaaggtgaaaaagcatcaaagccatgaagaattggatgacttggtaatgctttcggagtataatattattaggaataatatgaattccttaatgaaatttcaagatggtgtcaacacgatttcagaatctgataaaaatgctagacttaaaaagtttgatgaagattttgaccggattatcaagataaaagacattaaacagcgtaatcaagaatacactgagtttcttaataagttttttactgaagatagtcctgtctgtttgcttaatccagagaaaactctattcgagcaaattgagtcagtgtatttagacatcgaaggatacatcaaagattgggaaagcatttgcacgaaaactcacttgataagtatttcaaaagattattacaaaaacttatcaaaaagggctttttacgaagttgataaaaaaattagcactcctgaaatagcaatgtcaagtttgagaagcaaaaataattatggactcattgttggcaatgcaatctctgagtattggcaaaaaacaatcagcaaagccaattctttgttcaatgatttctttaagatagaatattataagatgaagaatgctttagcaaacaaaacgttaagtcataccaaaattaatcttgttgattttagaaaggcattcctatctttgtgtagtttaatagatgacagcctaacttctattgttaatggatcaatcttgattcatcgtagcagtaaagacgacgagcaatatgtcaatgattttattacaaacgaatcaataaacaatagatttaaactctttgataaaattagagagatacgaggtttgataaaaacagaaggaggtaacactcttttgggaagggctactttcaatccatacactgcacttcaaaaaccaaatctattctctgagaaactgagagtttccaaagaggattctaaagaagaacaaaagaaaaaaaatgaccttaataaatttcttggacaactacaacaattgttgaataatgaagatttcaagggaaagtcgaacattgaactttacaaacaattgtttggagctgataccgacaaaaaggagaaacttactgatagtcaattgtcagctgttcagcgtgcacagtatttcaagtttaaacagatacctgcatctgttagatttattttggccgattatcttagcgataaatatggctacaactttgcggaaatatcagcattgttccgtcaaattggtgtgcccatcactcctgcagaagattacaaacaattaaaagaaacgaggagatggtag

SEQ ID NO: 239 - DNA, 1260 bp, Unknown
  Unknown bacterial species
  misc_feature: Bd3Mmc3 effector gene
tgtttagtcgacttgtcagaatccaaagtatgggttgatagtttggaccacaataaaggacaaagagaaaacaatcagattactaaactaaaagaactatattatacaagacaatttgtgtatcatcttcagtctaaagctgacgatatacaaaaagaagtgcttcgtcttaagcaagagaaggatgcttttgcctctcaaaatacaaaagacactttctcatttaagtcagaattgataataccatttaaatgtggcaatgcctttgaatactatccttttgatgcgattaaggaaattacggagaagtacaacgaacttaagaacgaaggcaaacaagacgaaattcgcaaattctacgaacttgacgcttctcgcgagataaagaagggtatagtagctaatatgattggagtagtgacatatatcttcaaggaaatatgccatagtaacgcccgcattgttttggaaaacctttgcacagcatggaagatccaaaacgatgcattaacaggagctaagctagacagcactccaatgaactacttagttgatttcaaagaccaggaaaatagtcgcttggctggagttggcacttatagtatgttcgagatacaacttttgaaaaaaatcttcaaactccaagtggaagaaaacaaagattttgtccccgcttttagaagtgttgaagactacgagaagaccatcaaaaaactaagaaaaaagaaaaacagcaacaagccagcaatggattcttttggaatagtcggttttgtaagtccaatgaatacaagtcacaaatgtcctatttgtggtgccagtggcaactccaatataatccgtcacaaagaatctggagatgaattggaatgcaaaaagtgtggctattactctataccaagcaaaattcaagagaaatctttgttcaccaatgggaaatttgtcaataacgaaattgacgatttctacaatgagagcaacttaataatgattgagtcaggagatgacaacgctgcttatcaaatcgctgtcaaggctttgaagaacatcaataatgatttcttcaaaaagatacaatcacttcaaaagtcattaaacaaagatttggataatgatgaggtagaaccagacgttgaggaagaggtagaaaaagttcaggaaaaaactaccccatcaacaaacaagcccaaaaacaattggcgaccaaacaaaggcttcaacaataataggaataagaactacaacaacaagcgcaactaa

SEQ ID NO: 240 - DNA, 3093 bp, Candidatus Roizmanbacteria
  misc_feature: Rz2Mmc3 effector gene
atgcaaaattttaaagattttgccaatctttacgagcttttaaagacattgatgtttgaattgaagccacaaaatcaaaaagcagaagatatttctttggttttaaataatgggggagatattaaaaaattacttggacagcttcaatgtattcaagctaagtttttatgtatttttatttgtactaatagggaggaaagtggaaaaaccttagattttaaatttaaaaaagatagagagataaaatatggatggctcagaagctttactaaaaataaattttatgattggaaaaaagaaaacggtattatagataataacaagaaatattatttaacaaacattgattatttgccaaaagaattttcgcgatggaaaaaagaatggcaagaattaacggaacaattggaaaaattaacgaatacagaggaacatcaacaagaacggaaaagcaatatcgcttttgttttgcggagatttttaaaacgtcaaaactttgattttataaaggaatttatttttgcaataaaagatttacaaaatcaaaaaggaattgagggcgataaagaattacgggatttaaaaattttattggaaaatacaagcaaaaatttaaaagcttgtgagaaggaatatcttcctttacaaagcttagggccgatgttgcataaagcgagtttgaactattatacgctcaataaaacgccaaaagaatatgagaaattagttattgattgtaaatataaattaaaaataaaaaagttaaggttttttcttgataaaaaatttaattttggagaaaatccattaaattgcacacttgatgaagcttattataaaataaaggattggaaagctgagcaaaaagcaaaatttaatgaagcagtggctggaaatagattgacggtttcaaattttaaagaaaaattcccactttttgatgcttctgatgaaaattttttaaagttttgtaattttacgaaggagttggataatcatcctaaaaatgcaaaagaaatagcacaacggcgaggaagtttttttaataaaccaagagaagcggttcaaacagaaaattatttagaattctgtgaattgtacaaaagaatcgcaatggaacgaggaaagattttggcgaaaataaaggggatagaaaacgaggaaacgcaatctcaacttttggatcattgggctgttattttaaaggaagataaaaaacattctgtgataatgattccgcgaggagcagacgagaatcataaaagtgcgcatgagtttattggcaaaaatttttccaaagatggaaatggggaaataacactttatcactttaaatcacttactttacgggcattagaaaaattatgttttaagaaacttgaaaatactttttttagagaagtgcaaaaagagggggttaagtttcctcagtataaagaatatctgcgaaaacaagagtgcgccattgatcttatagaattttataaagaaattttgcagtcaaactatgcaaaaaaatatttagatttagttgattttggagggttgcagagcttccttgatgctgaatttacaggagtagaagaatttgaatcagcattggaaaaagcatgttatgtgaaaattccatttaggatttctgcagaacaaaaagaaaaatttattttagattttgatgcgaaagtttttgagatgactacccgaagtattgcgggagggaaaaaagagaatgagcatgctagaatttggaaagaattttggagtgaagaaaatcaagacaaaagtcatattactcggcttaatccagaaatgaatatcttttatcgtaaggcgcttgatgaaagagagggaaatagaaaccgatacgctgcagagagatatactcttgcgacaacgatagccctcaatgctacaagaaaaaaatctcatttagctttcaagacgacagaagacgtaaaaacttatattgacgaatttaatgcagaattcagcaaaaattttaccggagaatggatttatggaattgatagagggttgaaggaattggcaacgctttgtattacaagattttctgatgataaaaataaatttggagtggcgcaagcaaaagagtttgcagaaattgaagtttgggagctgaaaaatgaatataaagatgattgtttgaaagatgaagaaggaaatattttaaaaaatgcaaaaggagaaaatagaaagattattgataatgtttcttgtttagacgatattgatgagatattttttgataaaaaaattgtttcttgcattgacttaacaatggcaaaacttattaaagggaaaatcgtaataaatggagataaaaaaacttatttaaaattgaaggaattgtcggcaaagcgaagaatttttgaattattttctactgcgaaaattaaggaagattctgaaataaagtataaagctggaggtactctaaggattttgcaggaacccgtgtattggtatacagaagaagagaaaaacaccccagatcaaaaggaaattttgaagaatatggtagaagcttatatgaaagagttacatcaaaaagataagcttgaagatatagaaaaaataaatcatttaagagatgcgataacggcaaatatggtaggaataatcgcacatcttgagcaaaggttttctgggattattgcgttagaagatttagatgaaaaaaaagggggtttaagaacgattgatgaacactttaaccaaagtaatcaagttatttctcgtcgtttagaatggtcgctttatcgtaaacttgccaataatggggtggtccctccacaaataaagcaatcaattttattgcgagacgactttagagcttatcaatttgggattttaaagtttgtagaagtcgagaatacgagtaaaagatgtccaaaatgcggaaatatatttaaaaaaattaagggtcattatatttgtgaaaaagaaaattgtttttcttccaaggaaaatagatgtattttagaaaaaaacttaaataattccgatgaagtagctgcttataatatagcaaaaaatgcttttgatatgacattgaaagcgacagaaaaataa

SEQ ID NO: 241 - DNA, 1413 bp, Candidatus Roizmanbacteria
  misc_feature: Rz3Mmc3 effector gene
gcacagccttcatctttgtatgatgctcgaaaatttgaacaaaatcgctattgcaagccacaatatacaatggtaacgactttcaccgataatgcgcatggtaagaagtttgacttttcattcaccgacacagcaagtattaaaaaggcgattgatgactttaactccaactatgaaaaagcatcgaccgcccagtggtactacggcattgaccgaggcgaaaaagagctggcgaccttatgcatcggtaaattttcagcaaacgacaaccaggtacagtgcgagtttcccgcagagatcgaactatataaactcaaaccagagaagtttttctacagtaactcttttgacgaagatcagcctaaactcaaacttgacctcaagaaaggcaaatatgcttccgaaagaaagacaggccaagacgataaagggcatggcgggcccattaaaaatctttcttatcatctaaataaacttgaggatgaaaggtggtttgaacccacttccggcaaagaggctgcatgtattgacttaacgacggctaaagtgattaaagggaacatcatactaaatggtgattatatgaccttactggccttgcgtctggcttgggctaaaaggcaagtcttcgagcttttccatgacggcaaaattgatcataagtctgaggtaaaaagaagaagcaagaaaagcgattttttaggtgttttttgcaatgggggttttataaaatccgaccggagtgatgatgaagccaagcatggcctggtcttgtaccgttttacgacagaacaaaaaagtcaggctgaaaaaagcatccctcctgtaattgatgagttgaacaagtatctcaagggtcttgatgttagcagtaggtctaaaaacgagcctcccattgacaaaattaaccacttacgggatgccctgaccgccaacatcataggagtgcttaaacacctgaacactatttacccggccagagtcatcgctctggagaatctggatgaatataaaggcaccaacaaattcattgaggaccaactcataaaaagtgaaactatgctgctgcgccgtttagagtggtcgctgtatcgttctttccaggcggcaggcttagtccctcccggcatcaaggaaacaatcttactgaaagatgaatttaagaaaacacagttcggtattataaaatttattgaaactaaaggtacaagcagtaactgccctgtttgtgacaacgaacacaagaagacagacactcattatatttgtgaaaaggtagagtgtggcttttcctctaaagataatcaaaaaggcctggtagctttatccaactcagacaaagtggccgcttataatattgcccaaagagggtttaaatcatttacagcggttgccactcaaaaaaagtcctga

SEQ ID NO: 242 - DNA, 3168 bp, Candidatus Roizmanbacteria
  misc_feature: RzMmc3 effector gene
atgaaaaattttgaagagttaaaatatgagcaaagaaaaacgattcgttttaatctgcaacagaaagaaataaaaagagcttatacgccagtagatacttccaataatttaagtggtcaaataaaagattttaccaaaaaatatgaatcaattattgagggtttagaaaaactgatattttttgcaaagtcagagaaaaacgaagaaaaaagcttaaaaaagaaagtgtatatcaaacacacttggctccgcaattacacaaaaacggaattttacaattttgataaaaatggtagaaaaagaggcaatcaaacttcaatcagtgatagtaatttgaattttttaaaagagtattttgaaaactggatcagtgaaaatagagaatgtgtggaaaatatacagagtttttttaaccaaccagaggaagaacaaaaaagaatttccgagtttgcttattggattcaaaaaatttcaaagcgaagcaattttgaagcaatttttgaactgtttaatggaaatattcaacacaaagataacgatgaaaaaattattaacaacaagaaaactctggaagaatgcaaaccattactcaaaacattagaaaaagaacttttgcctagccagtctttaggggtggaaattgaacgagccagtttgaattattacaccgtaaataaaaagccgaagaatcatgatgaggagatagaagggaaaaagcaggcactttcagaaaaatatactttcaaacaaaacgatctagaattgtttcaagatgttggatttactgaaagcaatttactaattggagaattgaaacaagagatgaaagtattcaaagcaactcaaaaatcaaagttttatgagtttattagtcagaataaaagtcatgatgacttgaaaaataaggcttatttgaaattattaaatgatattagcaaagataactttaataaatttaaaaatgctaaaaacaagcaagacaaaggtaagttttttcaattcgcgaaaaataatttcccaaattttttcaaattctgtaatttgtataaaaatgttgcggtaaaatatggtcaaataaaagcagaaataaaagcactggaaaaagaaaaaattgatgctgagcgtttgcagtcttgggcggttattttggaaaaagataatctaaaatatattttgacaattcctcgcgatcctcaaaataatttacaaaaaaataatttacaaaatgccaaaaaatatgttgacaaattacaaaatgaacaaaatggcaaatggaaattatatacttttgaatctttaactttgcgagctttggacaagctttgttttggtttagataaaaatactttctatccagaaataaaagaagaattgcaaactaaaaacaggtcattttttataaacggaaatcttaaacgaaaagaccaattttctgatgatggcttggaattgattaagttttatcaaaccgttttaggtttagatgcaacaaaaagcatgctgacaataaagaattttgaaggacttgaagaaattattaaaaaaatctatacagtggataataaagaagaatttgagaaaggcttaaaacaaacttgttattacaaaaaagcaatttttatttctgaggatgcaaaaaataaaattatcagtgattatcaaggtaatttttataaaatcactagttatgatttagaaaaagatgataacgaagaaatcacaaaattaacaagtaagcaacggtttgatagaaataatcctgaagcacacactaaaatttggctggatttttggacagaggaaaagacagaaaaaaagcacgatattagactcaatcccgagttgaaaatcaattttgtggagaaaaatgcagaagaattagaaaataaaaaactgggcacattaggaaagaatagaaaacaagaagacaaatatttactttccacaactattacactgcaagcccatgaaaaaaatgctgatttagcattcaaaggaacagacgagattgtaaaatttatcaatgaatacaatgaaaagttcaataaaaatataaaaccgtttgatatttattattacggtttggacagagggcaaaaagagctattaaccttgggtttattcaaattttctgaaaaggaaaaagtgcaatttaccaaacaagatagaaccaaaggagaatacaataagcctgaatttattgaaattgaagcttaccaaataaaatcggataaatttttagaaaaaaacgaaaaaggaagaattgcctataaaagtgtttctgaatttactgatgatcctgatgttgtagaaaaaatcacaatcaattcttgttttgatatgtctactgctaagctcattaaagacaaaattgttatcaatggtgatatagcaacctatcttgaattaaaaagagtaagtgctttgcgaaaaatatacgaaggatttacgagaggtaaatttaaatccgacaccgtttgttttgatgcggacaaagaggctttatttcttaatattgaaaataaaaacaagttgcaaaatgaaaatctgtatttttatgatgaaagatttgaaagtattatttctttggatgaaatcaaaaaagaattgcaaggttattacaatactctaaagcaaaatggagctgtcgagataattacgattgataaaataaacaatcttcgagatgcgttatgtgccaatgcggtcggtatcttgaattatttacagaaaaaatattttggaatgatgtttttggaagacctggaaattgaaaataaaaataaaagaataagtgaattttctggtaatttggcaagtagaattgaatggaaattgttgcaaaaatttcaaactcttggtctcgtaccgccaaattacaaacaagctatgacattacaaagtgaaaaagaaatcaatcaattagggattgtcgcatatataaaaactgctggcactagtagcgaatgccctcattgtggcacaaaaaatacggataaatcagcgaaatggagtagccacaattataagtgtagtaattcaaattgttcttttgatagtagcgacattacaaaaagaaaggagcttgatgcaattaataactcagacaaagtagcgagctttaacatcgccaaaaagggacttaccaagttaaaccaaacaacatga

SEQ ID NO: 243 - DNA, 3777 bp, Sulfuricurvum sp.
  misc_feature: Sf4Mmc3 effector
ttgcacaaaaacaggatattaaccaaacaaataataacaatggaaaataaatatcagattacaaagacgattaggtttggcctgacactgaaacagcagggcaaaaagcatcaaacgcatcaggtcttgctcgatttgctaaacaggtctcaactaaaaatagaagaaactgttagaaaagacagcaacaagacggaacaggatttcgtaaggaatgttcgggattgttataatcaaatgaaaacatatctgaatggttggcagcaggtttatgaacgtgccgaccagataagcctgacgaaagattattataaaatcattgcaagaaaagcaaattttgatggattttggacgatttcgaggtttaacaaaagaaaaaatggacaagaggaagtaaagcagcctcagacacaactaatcaaggtttcttccctgaccacgaaatatttcgacaagccacgcaaggattacattgtggattattggcgtgagaatctttcaacggcacggcgactttgcaacgagttcaagctgcttttggagcaatacgaaacagccttgcataatgatgacaaggcccacaccaagccgcatttagtcgatttcagaaaaatgttcctgtcgctttgcaacagagtgagtgatacgcttgtgccgttggtgaatggttccatcacatttgacggcatagacaagttggctgacgaagagcgaaacaagaccgtcaaggaatttgcagcacctgaacaacgcgacgagagacaggctttgcttcaactcatcgaggaaatccgtgcttatttcgagagcaatggcaacaatgtgccgtttggcagggttacgctgaataaatatacggctcagcaaaagccccagaattatacagatgaaatcaaaaaaatcataagagatttgcagttgaatgcgcttgtgaaggatttgcaaaatgaagaaaatattgaggattattttcaagggcaggataagtttactgttttgaaagatgaaaacagaagtaatgtggaacgcgctcaaatgttcaagtgcaagcccattcctgtttcagtgcgtactcctttgttagaatttttgagcaagcattacgacattgacaaagcaaaagctgaaaaggttttgtgcgaaatcggcacacctgtaagccctgcctacgattactcaaaactttcggaagcggagaaaaaggatttctccttggaaaagtatccgataaaacttgctttcgactatgcttgggagaatctggcacgagaaatcatgaatcatggcgtcgattttccgaaggatgaagctgaacgttatttaaaaactcattttggtgttactgaagcaacggatgcgcttcaattatatgcacggttgctttttgtaaaagaaaaaatatccgcacttttcaacgaggaaaatcaagcggcaaacaacaaaaaagaaattgatccggaaaggaaaaagacattaatagatgagattgataatactttccgtgaaatcaattatccgtataagcaaaaagaatatgaggactacgaagctgacatactcgattggctggataaatctaaatcggagcgcaaaaatcttaggaaaaacaacgatgaattgtataaaagttacgaaaaagcccaacagaaaatggggcttctccgtggcgagcaaaaaagcaaaatcttaaaatacagggatttgaccaatgaattcaagaaaatagccataaatttcggaaagagttttgccggactgcgtgataaattccgtgaggaaaacgaaatcaataagattacttattgcggcattatcgttgaagatgaaaaggccgaccgttatctgcttttgcagcctatcaatgataaaaacgatacggccaagcaaaatgttacgaaaatatacgaaaccgaaagcgatggcttgacgacttatcaagtgaagtccttgacctcgaaaacgctcaacaagatgattaagaatgcgggagggtatcgggattttcattcttgcgaaatgagaatcaacagttacaaggccaaaaccgattgggcaaattatcaagacaatccgtcgtttgttgaggcactgaaggagatgttggcaagttcaagaatggcacgacaacaaaactggtcagaattcagttgggatttcagcgagtgcaaaacttacgatgcaatagccaaagaagtggataaaaaatcgtatgtcttgcaaaagggcaagatttccattgagaagattacggatttggtcaataatggcggatgtttgctgttgcctatcgtaaaccaagatattacttcggaaacacgagtgttgaaaaaccagttcagcaaagactggcagatgatttttgatgagaacttgaaggaatatcgtctgcatcctgagtttgcaattacatatcgccagccaacgcctgattatcctcaacctggtgaaaaacgctattcgaggttccagatgattggcggtttccagtgtgagattgtgccgcaaagcgatgacttcatttcgaaaaaggagcagatagaagtctttaatgacaaaaaagcacaagaacaaaaagtgtcggattttaatggcaaaataaatttaggtaatgactattttgtgattggcatcgaccgcggcatcaagcagttggctacgctttgcgtcttgaacggcaagggcgaaattcaaggcgattttgagatttatacccgcacatttgatgatgtgaaaaagcagtggattcattcgctgtcatataagaccggcatcttggatttgtcgaatatgcgcgtcgagactacggttgaaggcaagaaggttttggtggatttgtctgccatcaagacgaaggatgaaaacgggaattacacgaaagagaaccttcagaccgtgaagttgaaacagctggcctatatcaggaagttgcagtacaagatgcaatatgacgaaaaatccgttcttgattttgtcgaaaaacataaggcagaggaggaaatacagtcgcacattagcgaattgatttcaccctataaggaaggtgagcgttttgctgatttgccaatggcgcaaatcaaggatatgttggagcagtttaagactttatgtgaggaaaagcgtgacaaggaaaagcgcgaactttgcgagcttgatgctgccgaccatctgaagtcgggcattgtggcaaatatggttggtgtggtggcttatcttgttgaaaaatatgattataaagtctatgtttcgttggaaaacctctgccgcgcctataggtttgcaacggatggactgaacggacaaacccttccaagcacaagccaagaccccgaagtgaatttcatggaacaggaaaatctggtcttggcgggtgtcggcacttaccgtttctttgaaatgcagttgctgaaaaagctgttcaagatgcagcaggatgaaaagattatcaatcttgtgccagcattccgttcggttgacaattacgaaaagttagtcaaatgcgataaggaaaacggcgataagtatgtgaattatccttttggtatcgtccgctttgttgacccgaaaaacacttcgcaccgatgcccgaactgtggcagcacaaaggttagccgaagaaacaatgtgataacctgcaatgattgcggtttttcaaccgccaatcattcaaccggaacctcacatttgaagttcatcacaaacggtgacgacaacggcgcgtaccatattgccaagaaaacgtttgagaacctccaaaacaagaatgggacacccgattaa

SEQ ID NO: 244 - DNA, 3900 bp, Sulfuricurvum sp.
  misc_feature: Sv3Mmc3 effector gene
ttgattatgggaaaaaatgaaaacaaataccagttatcaaaaacattacgttttggactaacactaaaagagaagatttcgaataatgagaaaacaccttaccaaagccattctcaattcagagatttaattatcctttcagaaaacagaatcagagaaggtatcagcactccccaaaaccgtgacttaccctcttttatccacagaattcaaaattgcaccgattttatcaatgatttcatccatgattggtggatgattctgatgcacacaggacaaattgaattggacaaagactactataaaagcctaactaaaaaagtgggatttgtaggtttctggtacaaagagaacaaaaaaaagggtggaaaaacgaagcaaccacaagccagaaacataccaatgggtgagcttagacatctttgtccccaaaatactaaggagtgtgccacatacatcaccgattattggaaagatcttttgataacagcaaccaacaaactgtatgaaagcagtgaacaacaaaagaaattcatcaaagcgatggagcagaatcgcacggataacaaacctaacgaaatagatctgaaaaaatcttttttgagtctggtatctgtgacaatggaactgctaaaccctattctaaacgggcagatactattcaacaaaatggacaggctcgatatgtctaaaaaaagcgacaatgatttcattgatttcgtcaatgatcacgaaacggttcgtgaattaaacaatgacattgaagaaataatcgctgatttcaaagaaaacggcaataatgtaaactattgcaaagcgacacttaatccagacacagcattaaagcaacacaacaacaatattccaaatgatatagcaactgatttggaagagctaatgatggacagcatcgtcggaaattatgatgatgtcaactcttttatggataattatgtttcaaatttatctgcaaaagataaaataaaaaaaatcaaagactccaatataagccttatttatcgcgctatcctcttcaaatacaagatgattccggcaaacgtaagaagagatatagcccaaggaatggccaaaaagctcaataaagacgaagagaatatctacagttttctatgcgagtttggcactttgcgtactccacaaaaagactacgctgatctgaaggacaaggacagtttcaatcttgacaactatccattgaaagtggcgtttgatttcgcatgggagggattagcaaaagcttggtatcacgaccaatctgattttcctattgatccatgtcgtgattttctacaagaaaattttgatgtgaacttagaggaagaccaagaagacgaatattttcttctgtatgcagatcttatcgagctaaacgccttattatcaactctcgacaaagggaatcctgcagaccccgactcaataaaaaatgaagcattggagatggtcgaatacataaattggaattcacttgacaaaaaaaatggaaactactacaaaaaaataatcaaaaaccgtctgaaatcttcgaagggcaacgaaacgtacgaaagaataaaaaaagagatttccatgagccgtggacgtcttaagaacaaaatagaaaaatatgacgatctcacttctcaatacaagcgtattgccatggatttaggaaagaaattcgcctctttacgagacaaaattatagctgcgaatgaggataacaaggtgactcactatgcaatgattcttgaggattccaattgcgacaaatatctcttgttgcaaaaagtaagcaataacatttatcattgtatgagttacgattcttcagatcccaaagcttactatgtcgactctatcacatcttctgcaatagcaaagatgatcagaaaggaaacgaatccatccaagataagagagtatgctgaattagaagagaaagaaagagagagacggaacgttgatgattggtgcaggtttataagcaaaaaagaatacgacaggaggtatcagttgaatattaacaatggtttatcttttgaggcactaaaaaaagagatcgattccaagagttatattttggtgaaaaagaacattagtgttgattctatccgtgaacttgttgaaaatgaaggatgccttcttttccctatcgtcaataaagacctcacaaaggaaaggaaaacaacagaagacaatcaattcacaaaagattggaatatgatattctctgggtctgaaaccaattggagattaacccctgaattcagagtgacgtatagaaatccagtaccaggatatcctaatgacaaatttgggtcgaaaagatattcaagattccagatgaacgctcattttgtatgcgattttattccatcctctaattcatacacatccaacagagagcaaatcgccatattcaaagacgagggagaacagaaaaagagagtagaggaatttaatcgcaccctatcaaacatcaatcaaaaattctatgtcattggtattgatagagggcaaaaagagcttgccacactttgtgtcgtcgaccaggataagaaaatacacggagattttaagatctacactcgcaaattcaattccgaaagaaagcaatgggagcattattctctcgaaggagaaaaagggacaagaaacatccttgatctatctaaccttcgtgttgagacgaccattataattgatggcaaaccagaaaggagacaagtgcttgtcgatctgagtgaggtgttggtgaaggataaagaaggaaattacacaaagcccaacaagatgcagatcaaaatgcaacaaatggcttatgttcgaaagcttcagttccaaatgcaggcaaatccaaccgaggttttggaatggtatgagcagaatccaacagaagagttgatcataaagaatctcgtcgacaaagagaacggagaaaagggacttatctctttctacggaacagcacttgtagaactagaccagacacttcccgtctcaaaaataaaagagatgctcgaggaatttaagatactgaagcaaagagaaagcaaaaaggagaatgtgcaaaaagagctgaataaccttacacaacttgaagctgtcgacagtctgaaagcaggaattgtcgcaaacatggttggtgtgatctcatatatcttaaagacactggattataatgcctatatctcactcgaagatttgtctacagtgcaatccagcaccgaatttgcaagtggaatatcaggagcaatcaccaaaatgtcgagagaagaaggaagaagaatagatgtggagaaatatgccggtcttggattgtataatttcttcgagatgcaattgctacgaaaactacaccgcatacaaacagacaacggaaacattcttcatcttgtccctgctttccgtgcccaaaagaattacgaccacatcatggtaggaaaagaaaaaataaagaaccaatttggaatcgtgttctttgtagacgcggcagctacatctatcaaatgcccacgctgtggagcggtcaatgaggataaattcaatccagataaacaaaagtacccagatgcagaaaaagggccaaaattgagaaatcgcaaggagcagtcaggcaaaaaagtatgggtaaccagagacaaggaagacgacgaccgtatcaaatgctattgctgtggattcgacacaaaggaaaagaacgaaggaaatccttttatgtatatcaagagtggcgacgacaatgcagcctatcttatatcagatttaggagttgagtcttacagaaaagcttatgaattagctgcgactgtagtggaagacagaaaaaaaacattaactaacaatttaaatcaaagcaactacaaaattagatttttatggcacactatgtattag

SEQ ID NO: 245 - DNA, 3876 bp, Sulfuricurvum sp.
  misc_feature: Sf8Mmc3 effector gene
atggaaaacattaaaaatgggtaccagctatcaaaaacattacgctttgggttaacacaaaagtgcaagaaaagaagaaaaaattacgagggtgaaatttatgagagtcataaagagttaaatgatttgattatgttttcagaagaacgtattaaacaatcattatctattgataaaaaatccgaattgcaattctccataaataatatagaaaaatgtttgcttctagtagataatttcttttttagttggcaacaagtttatcaaagagacgaccaaatagctttagataaagattattacaaaatactttgcaaaaaaattggatttaatggattttggactgaaaaaagacggacacaacaaaagataaagaaaccgcaatcacgtgttatatccctttcggagcttaaaaaatcagatgaattaggtaaagaacgcattcaatatattttggattattggagagataatctattaaatgcagcagaaaaatacgagcttgtaagtgaaaaattgaaacaatttcaagaagctttaaagattaatagaacagatagcaaaccaaatgaagttgaactacgaaaatcgtttctgtctcttttacatattgttaatgatgcccttatgcctctttgttatggacaaattttgtttcctaagactgaaaaattagatagtagtaaaggtcataatcaaaaactgattgaatttgcaacagatcatcaatcaaaaagtgatttgctttctgaaattacagagataaaaaaatatttcgaagagaatggaggtaatgtccctttctgtcgggctacgttaaatccaaatacagctcttaaaaaccctaaatcttctgataataaaattgaagaggaaataaatatattaggactgtcaaatattttaaatgaacataaatctgttctgttttataataaatatcttgaagatttaccaactaaagaaaaaataaaattgctaaaaaataaaaatttaaattatattacacgtagtttgatgtttaaatataaatcagtccctgctatcgtgcaatatgaaatagccaagacgttaagtacgaaaaatggtaaagctgaagaagatttgcgcatttttttacgcggtataggtcgggctaaaagccctgcaaaagattatgccgatttgcaagataaaaacgactttaatattgaggcataccctctaaaggtggcttttgattttgcatgggaaggattagcccgctctatataccattctgatatgctatttcctcttaaacagtgtagtgtttttttggaagataattttggagtaaaaattgataataaaaatttccaattgtatgcaaaattacaggaagttaatgcgctattatcaaccattgaatatgggaaaccaactgatgagcaattattaaagaaacaggtaataaacttactatgtgaaatagattgggctgcaatgaaaaaaaatgggcagcaaaacaaattggcaatagaaaactggctaaagaataaaaacaataaaagtgattttaaaactgccaaacagcaaataggtttaattagaggtactcttaaaaataaaataacggaatactataatattactcaagaatacaaagatatagccatgcaagcagggcgtatctttgctaaaatgcgagataaaataacaggggcagctgagcttaataaagtatcacactacgcaatgataattgaagatagtaatgcagacaaatatgtcttgttacaagagtttacagaaaaaaaagatgatagaatatatgcaaaaacggaatataataatagagatattgttacctattccgttaattctgttacttcaggagctattgctaaaatgttaagaaagaaaagattagagagtttaaatgataaatatggtgaaagcacgtttcagcagcaggaacttactaaagaacaaaaggaacagcaatatattaaggagtggaaagattttattgaagaaaagcgttgggatttggaatttaaattaaaaattaaaggaaaagattttgagcaacttaaaaaagaaatagactctaaatgttatgagctaaacaaaaaatatattaatagagaaaaacttgttgatttaattaataataaaggttgtttgctgttcccaattataaatcaagatttagcaaaaaaagaaaaatctgagacaaatcaatttactaaagattggaatgcggtgtttgcgcaaaatactccttggcggttaacacccgaatttagaatatcgtatagaaaaccaactactaattatccggagtctgatataggtgataagcgttattctcgttttcaaatgattgggcatttcctttgcgattacattcctaaaaatgataattatatatcaacaagagaacaaattgccatctataaagatgataaacaacaagaaactgccgtaagtagatttcatgataaattaaaggctagaactgaagcggaagagcataatgactctattaacgccctaattgcaaaatttggaaacgtaaataaaaataaaaaatctattatagcagataaacctaaagaagaattttatgtatttggcattgatcgtggacaaaaagagcttgcaacgttatgcgtaatagaccataataaaaagattataggagattttgagatttatgttcgttcttttaattccgacacaaaacaatgggaacataaatttttagagaaacgtcatatcttggatttatctaatttacgggtagaaacaacgctatctattgatggaaaacccgaaaaaagaaaagttttagtagacttgagtaaagtaaaagtaaaagataaaaacagaaattttaccaaacctgataaaatgcagattaagatgcaacaactcgcttatatccgaaagttgcaatttcagatgcagacgaatcccgaagtggtacttgcttggtatgaaaaaaactcaacaagagagttgatgttgaaaaattttgtaaagaaatcagacgatgacaataatggtcttgtctctttttatggagctgctgttgaaaaattggaaaatactttaccaatagaaaggataagtgaaatgcttcaaaaatttgacttattgaaaaaaaaggaaaaagagggagaagatgtaaaattacagatagaccaattggtgcaattggatcctgtagataatttaaaatcaggtgttgtcgccaatatggttggagtaattgctttcttactacaacagtttaaatatcaagtatatatatcacttgaagatttatctaatccatttagtagtcaaataacaggaggtataacgggggttccgttgtcggtaagtaaaggagatggaaggagggttgatgttgaaaaatatgcaggattaggtctttataatttttttgaaatgcagttattaaagaaactattccgcatacaacagaataatgaaactatattgcatttggttccggcttttagagctcaaaagaattacgaccatgaggcggtaggaaaaggaaaaataaagaatcagtttgggattgtattttttgtagatgcaaatgcaacctctaaaacgtgtcctgtttgtggtacgacaaataaaagtccaaataaaaaagagtatccaactgctcggaaaggaatttcacaagaagggaaggaggtatggatagaacgtgataaatcaggtggtaatgatattattagatgtttcgtgtgcggttttgatacaacaaaaaaatatacagaaaatccattgcaatacattaagagtggagatgataatgctgcatatcttatttcggcaaaaggaatcaaggcgtatgaattagcaactacattaacagacaacaaataa

SEQ ID NO: 246 - DNA, 3543 bp, Unknown
  Unknown bacterial species
  misc_feature: No3Mmc3
atggaaactataagatataatagatttattagatttaagttgcaatctgataaaacaaatactttaattgaagaaaagattgcttcattgagtaattcggataataaggagttcgatttggtgaattttttcagcaatttaggtgattatttgtccgatttttacgactatattttttccgaaaaagaagatcagggaacaatcgtcaaaggttatatgtcggttaagaatgattggataaaaagttatgcaaggcaggcgtatgcaggttttgttgaatcggaaaaaacaaacaaggaaacgaaaagacaaagggtgcagcatacattgaaagattttgagaaatacggtttatcggaaaggattattaatgcgtataatgatgttgttgatgtattggacaagttagacgatgtggtatcaagagataaacacgaaagaatggatagagctcaaacgtctttattgctcggacgtttgaaaatcaaaggtgcgttgcctctacttgtgtcattggttgatagtgtatcagacaaaaaagaagaaggtgattttagtttaatattgaaacagaaagggaaagaattacttgagcaattggaattgggtatattaagttttcttcccgaacaatcgaaaggttatccgatagcaaaagcaagttttaatttttatacaatcaataaaaaacccatagactatactgaaaagattgagacaataaataaaaaattgaaagtcgattttagtgagctaaaagaattgaagtggaagggctcaaaagagttatggagtaagataaagactgatatagagcaaaggtcgaaaggcaaagaactattgcttggcgaaatgccaatgagagatatttcggaatatgctaacttgcgacagatactcaaaaatatattgtcaaaacaaaaggcgaagtttagcgagttaatgcaaaaagaagatagctgttatagtgatttgcaggaaagtgaattgtacctttttgacaatatcagtgaagatgagtttgatgaatattttgaacttaccaaacaaattgaaacgattgcaactaaaagaaataaaacacatgatacggctcaaaagaaacaattgcgaactaaattaaataacttgaaaaaggaaaggggaaaccttatcagtgcggcatgtagagatacacgggatatgtttaaagcgtacaaggaagttgcggaattttatcgaaaggtggctcaaaaccacggtaggttctatgctcaacttaaagcaatggaaaaagagagaaatgaaagccagatggtaaattactgggctttgatattgcagaacgagaataaacataaacttgttcttataccacgtaatcaagcaagtgattttaagatacgtttgaaagaatcggaggataggacaagtaaaatcaaacttttttggttcgaaagtttttcgttcagaagtttacaaaaattgtgtttcagtaatattgagagtggagccaacaagttttattcggatttggagaaagagtatgagttaaagaaaaagtattcttttgatggaaaatttatcaccggtgaatttcagttgcagggagacgaacaaaggaaaatagagttttataaagatgtcctaagatcgagagttgcaagcaagatgttgagtatatcacgagaagaacttaaagatgaggtattggatgttgattttgatagtttgaatgatttcaaggtagcacttgaaagagttagttataagcgtatgtttatgaccaagacttggattttagaagatttggtaagcgacaaattcaatgcacaagtattcgatataacttctattgatttgagacacgatgagagttgtagcggtaaggaaagattgtatgattataccgataagttacatactcagatatggaaagagttttggagcgaagagaacgagaataataattttgacattagactttgtccggaaataacattgatgtatcgcaaaccgaagccaagcagaattgtaaaatatggcgaaggtagtactcaaagaaatcgttatctgcacgagcaactaaccttggttactcgatttacggaaagaagcaattcttcgggacgcgaacttgctttcttagcaaaagagcaagagaaaaaaattgtggaagacttcaataaaaaggttcttaaggagaatatgcgttttgctctcggtattgacaacggagaagtcgagttatctactttgggagtatatattcctgaatttgggcaaggtaccaatgaacaaaaattggatatgttgagcgatgtcgaaaagtatggttttccaactcttacgataaaagatttgaaatataaggagacggatattaaaggaatagacagatatgttgttaaaaatccgtcatactttatcaaggaggacttgtattgccgtacatttaatagaaaccatgaggattatgaaaaaatgtttgccgaacttttcaaaagcgaaaatcttctgtcattggatttgagtacagcaaaaatgataaacggtcatattgttacaaatggtgatgtggtgtcgttgttcaatctttggaagcgtcatgctcaaagaaatatttatgatatgaatgaacatcaaaaggcggaaggagatagagaggtaaaacttaaacgaagcaatgaattgtcagttgttgagcgtaggaagtttattgactatctgaatacaggtgataacaagaatcaaaaatatgagaaactttcggaagagcagaaatctgaatatgtagattggatttacaactgttggaatggaaacgaaaagaaaaacgatgtttttgaagacgtttataagaaatgtaaaaggaaaggaaattttgccgatattgtcctttatgcggtttgctctaatagtaaagaagtggaaaaagtcgttgatgtttttgatataagaaacatatttaagtttagaaaggattttgattgtttgatgagcgaagataaaatcagggccgaattggatcaatataatgtacgttcttctatatcagacgaagaattggatttgaatttgaaacaaacaaaatcctcgttggttgccaatgtaatcggggtgattgattttctttacaatgactataagaatagatttggaggagatggaattattgtcagtgagggctttggtgtaaataaggttgaaagcgatttggaaaagttctcaggtaatatttacagaatgttggaaagaagattgtatcaaaaatttcaaagtaggggacttgtaccaccaataaagaatattctgttgtttagagaaaatgataataatgtaaacagaaatattcctttcttacaaattggtaatatttgttttgttgatcctatgggtacgagtcagaaatgtcctatttgtgaaaataatgtgttgaaccatacagaatcttgttcaaaatgtgggtttaagagtaagggtataatgcactcaaatgatggtattgccggttataatatcgctaaaagaggatacatagagtttttgaaaatgaaaaattag

SEQ ID NO: 247 - DNA, 20 bp, Oryza sativa
  misc_feature: Index-Sp3-F2
atgcaggtggtagaggttct

SEQ ID NO: 248 - protein, 8 aa, Artificial Sequence
  Synthetic
  misc_feature: Peptide tag
WSHPQFEK

SEQ ID NO: 249 - RNA, 50 nt, Artificial Sequence
  Synthetic
  misc_feature: Guide RNA used in HEK293T cells
uuuaauuucuacuauuguagaucacuuauaaucuacucguucaccaaucu
